(19) United States
(12) Patent Application Publication
(10) Pub. No.: US 2020/0283806 A1
(43) Pub. Date: Sep. 10, 2020

(54) MICROORGANISMS AND METHODS FOR THE PRODUCTION OF OXYGENATED COMPOUNDS FROM HEXOSES

(71) Applicant: Braskem S.A., Sao Paulo (BR)

(72) Inventors: Daniel Johannes KOCH, Campinas (BR); Lucas Pedersen PARIZZI, Campinas (BR); Felipe GALZERANI, Campinas (BR)

(21) Appl. No.: 16/796,417

(22) Filed: Feb. 20, 2020

Related U.S. Application Data
(60) Provisional application No. 62/808,247, filed on Feb. 20, 2019.

(51) Int. Cl. C12P 7/18; C12P 17/02; C12N 15/52; C12N 1/20; C12P 7/28; C12P 5/02

(52) U.S. Cl. CPC C12P 7/18; C12P 17/02; C12N 15/52; C12R 1/19; C12P 7/28; C12P 5/026; C12N 1/20

(57) ABSTRACT

The present application relates to recombinant microorganisms useful in the biosynthesis of monoethylene glycol (MEG), or optionally MEG and one or more co-product, from one or more hexose feedstock. The present application also relates to recombinant microorganisms useful in the biosynthesis of glycolic acid (GA), or optionally GA and one or more co-product, from one or more hexose feedstock. The present application relates to recombinant microorganisms useful in the biosynthesis of xylitol, or optionally xylitol and one or more co-product, from one or more hexose feedstock. Also provided are methods of producing MEG (or GA or xylitol), or optionally MEG (or GA or xylitol) and one or more co-product, from one or more hexose feedstock using the recombinant microorganisms, as well as compositions comprising the recombinant microorganisms and/or the products MEG (or GA or xylitol), or optionally MEG (or GA or xylitol) and one or more co-product.

### CROSS-REFERENCE TO RELATED APPLICATIONS

[0001] This application claims priority to U.S. Provisional Application No. 62/808,247 filed Feb. 20, 2019, entitled “MICROORGANISMS AND METHODS FOR THE PRODUCTION OF OXYGENATED COMPOUNDS FROM HEXOSES”, the disclosures of which are incorporated by reference herein.

### TECHNICAL FIELD

[0002] This application relates to recombinant microorganisms useful in the biosynthesis of monoethylene glycol or monoethylene glycol and one or more co-product from one or more hexose feedstock. This application additionally relates to recombinant microorganisms useful in the biosynthesis of glycolic acid or glycolic acid and one or more co-product from one or more hexose feedstock. The application further relates to methods of producing monoethylene glycol or monoethylene glycol and one or more co-product from one or more hexose feedstock using the recombinant microorganisms, as well as methods of producing glycolic acid or glycolic acid and one or more co-product from one or more hexose feedstock using the recombinant microorganisms. The application further relates to compositions comprising one or more of these compounds and/or the recombinant microorganisms.

### STATEMENT REGARDING SEQUENCE LISTING

[0003] The Sequence Listing associated with this application is provided in text format in lieu of a paper copy, and is hereby incorporated by reference into the specification. The name of the text file containing the Sequence Listing is BRSK-004_02US_ST25.txt. The text file is about 616 KB, was created on Feb. 18, 2020, and is being submitted electronically via EFS-Web.

### BACKGROUND

[0004] A large number of chemical compounds are currently derived from petrochemicals. Compounds such as monoethylene glycol (MEG), glycolic acid, acetone, isopropanol (IPA), propene, serine, glycine, monoethanolamine, and ethylenediamine are valuable as raw material in the production of products like polyethylene terephthalate (PET) resins (from MEG), plastic polypropylene (from propene), polyglycolic acid and other biocompatible copolymers (from glycolic acid) and polyurethane fibers (from ethylenediamine). Alkenes (such as ethylene, propylene, different butenes, and pentenes, for example) are used in the plastics industry, fuels, and in other areas of the chemical industry. For example, isobutene is a small, highly reactive molecule that is used extensively as a platform chemical to manufacture a wide variety of products including fuel additives, rubber and rubber additives, and specialty chemicals.

[0005] However, the compounds are currently produced from precursors that originate from fossil fuels, which contribute to climate change. To develop more environmentally friendly processes for the production of MEG, researchers have engineered microorganisms with biosynthetic pathways to produce MEG. However, these pathways are challenging to implement, with loss of product yield, redox balance and excess biomass formation being some major obstacles to overcome.

[0006] Thus there exists a need for improved biosynthesis pathways for the production of MEG and other chemical compounds useful in industrial and pharmaceutical applications.

### SUMMARY OF THE DISCLOSURE

[0007] The present application relates to recombinant microorganisms having one or more biosynthesis pathways for the production of monoethylene glycol (MEG) or glycolic acid (GA), or optionally, MEG (or GA) and one or more co-product from one or more hexose feedstock.

[0008] The recombinant microorganisms and methods of the present disclosure combine the advantages of glucose based, fermentative MEG production and xylose based, fermentative MEG production. In some embodiments, the recombinant microorganisms and methods of the present disclosure combine the advantages of xylose degradation biochemistry for high yielding MEG (or GA), or optionally, MEG (or GA) and one or more co-product, formation with the advantages of readily available pure hexose sugar feedstocks.

[0009] In some embodiments, the recombinant microorganisms and methods of the present disclosure solves the problem of xylose feedstock availability. In some embodiments, the recombinant microorganisms and methods of the present disclosure solves the problem of non-affordable xylose feedstock price. In some embodiments, the recombinant microorganisms and methods of the present disclosure solves the problem of xylose feedstock impurities. In some embodiments, the recombinant microorganisms and methods of the present disclosure solves the problem of inefficient xylose uptake by a microorganism. In some embodiments, the recombinant microorganisms and methods of the present disclosure solves the problem of glucose induced inhibition of xylose utilization. In some embodiments, the recombinant microorganisms and methods of the present disclosure solves the problem of a shortage of ATP in MEG (or GA) production pathways. In some embodiments, the recombinant microorganisms and methods of the present disclosure solves the problem of excess NADH in MEG (or GA) production pathways. In some embodiments, the recombinant microorganisms and methods of the present disclosure solves the problem of low overall product yield potential.

[0010] In some embodiments, the recombinant microorganisms and methods of the present disclosure provide a lossless conversion of one or more hexose feedstock to one or more pentose-5-phosphate intermediate. In some embodiments, the one or more pentose-5-phosphate intermediate is used for the production of MEG (or GA), or optionally, MEG (or GA) and one or more co-product, by one or more xylose based fermentation methods. In some embodiments, glucose flux is funneled into the pentose phosphate pathway instead of the glycolysis pathway.

[0011] In one aspect, the present disclosure provides a recombinant microorganism comprising one or more biochemical pathway that produces monoethylene glycol (MEG) (or glycolic acid) from one or more hexose feedstock via one or more pentose-5-phosphate intermediate. In one embodiment, one or more co-product is co-produced with MEG (or glycolic acid). In another embodiment, the one or more pentose-5-phosphate intermediate is one or more of D-xylulose-5-phosphate, D-ribulose-5-phosphate or D-ribose-5-phosphate.

[0012] Therefore, in one embodiment, the application relates to a recombinant microorganism comprising one or more biochemical pathway comprising the expression of at least one enzyme having an activity that converts one or more hexose feedstock in a lossless conversion to one or more pentose-5-phosphate intermediate.

[0013] In some embodiments, the recombinant microorganism comprises the expression of at least one enzyme having transketolase activity. In some embodiments, the enzyme having transketolase activity is encoded by an amino acid sequence having at least 70% sequence identity, at least 80% sequence identity, or at least 90% sequence identity to tktA from E. coli. In other embodiments, the enzyme having transketolase activity is tktA from E. coli. In some embodiments, the enzyme having transketolase activity is encoded by an amino acid sequence having at least 70% sequence identity at least 80% sequence identity, or at least 90% sequence identity to tktB from E. coli. In other embodiments, the enzyme having transketolase activity is tktB from E. coli. In another embodiment, the one or more nucleic acid molecules encoding the enzyme having transketolase activity comprises an amino acid sequence selected from the group consisting of SEQ ID NOs: 148 and 150. In some embodiments, the one or more nucleic acid molecules encoding the enzyme having transketolase activity is tktA, or homolog thereof. In some embodiments, the one or more nucleic acid molecules encoding the enzyme having transketolase activity is tktB, or homolog thereof. In a further embodiment, the one or more nucleic acid molecule encoding the enzyme having transketolase activity is encoded by a nucleic acid sequence selected from the group consisting of SEQ ID NOs: 147 and 149.

[0014] In some embodiments, the recombinant microorganism comprises the expression of at least one enzyme having transaldolase activity. In some embodiments, the enzyme having transaldolase activity is encoded by an amino acid sequence having at least 70% sequence identity, at least 80% sequence identity, or at least 90% sequence identity to talA or talB from E. coli. In some embodiments, the enzyme having transaldolase activity is talA from E. coli. In other embodiments, the enzyme having transaldolase activity is talB from E. coli. In another embodiment, the one or more nucleic acid molecules encoding the enzyme having transaldolase activity comprises an amino acid sequence selected from the group consisting of SEQ ID NOs: 152 and 154. In a further embodiment, the one or more nucleic acid molecule encoding the enzyme having transaldolase activity is encoded by a nucleic acid sequence selected from the group consisting of SEQ ID NOs: 151 and 153.

[0015] In some embodiments, the recombinant microorganism comprises the expression of at least one enzyme having ribulose-5-phosphate 3-epimerase activity. In some embodiments, the enzyme having ribulose-5-phosphate 3-epimerase activity is encoded by an amino acid sequence having at least 70% sequence identity, at least 80% sequence identity, or at least 90% sequence identity to rpe from E. coli. In other embodiments, the enzyme having ribulose-5-phosphate 3-epimerase activity is rpe from E. coli. In another embodiment, the one or more nucleic acid molecules encoding the enzyme having ribulose-5-phosphate 3-epimerase activity comprise an amino acid sequence set forth in SEQ ID NO: 158. In a further embodiment, the one or more nucleic acid molecule encoding the enzyme having ribulose-5-phosphate 3-epimerase activity is encoded by a nucleic acid sequence set forth in SEQ ID NO: 157.

[0016] In some embodiments, the recombinant microorganism comprises the expression of at least one enzyme having ribose-5-phosphate isomerase activity. In some embodiments, the enzyme having ribose-5-phosphate isomerase activity is encoded by an amino acid sequence having at least 70% sequence identity, at least 80% sequence identity, or at least 90% sequence identity to rpiA from E. coli. In other embodiments, the enzyme having ribose-5-phosphate isomerase activity is rpiA from E. coli. In other embodiments, the enzyme having ribose-5-phosphate isomerase activity is encoded by an amino acid sequence having at least 70% sequence identity, at least 80% sequence identity, or at least 90% sequence identity to rpiB from E. coli. In other embodiments, the enzyme having ribose-5-phosphate isomerase activity is rpiB from E. coli. In another embodiment, the one or more nucleic acid molecules encoding enzyme having ribose-5-phosphate isomerase activity comprise an amino acid sequence set forth in SEQ ID NO: 156. In a further embodiment, the one or more nucleic acid molecule encoding the enzyme having ribose-5-phosphate isomerase activity is encoded by a nucleic acid sequence set forth in SEQ ID NO: 155.

[0017] In some embodiments, the recombinant microorganism comprises the expression of at least one enzyme having a transketolase activity, a transaldolase activity, a ribulose-5-phosphate 3-epimerase activity, and a ribose-5-phosphate isomerase activity. In other embodiments, the recombinant microorganism further comprises a deleted or diminished activity in one or more endogenous enzymes selected from glyceraldehyde 3-phosphate dehydrogenase, phosphoglycerate kinase and phosphoglycerate mutase. In some embodiments, the endogenous glyceraldehyde 3-phosphate dehydrogenase enzyme is gapA, the phosphoglycerate kinase is pgk and the phosphoglycerate mutase is gpmA and/or gpmM.

[0018] In some embodiments, the recombinant microorganism comprises the expression of at least one enzyme having fructose-6-phosphate phosphoketolase activity. In some embodiments, an enzyme having fructose-6-phosphate phosphoketolase activity is encoded by an amino acid sequence having at least 70% sequence identity, at least 80% sequence identity, or at least 90% sequence identity to an enzyme having fructose-6-phosphate phosphoketolase activity selected from the group consisting of Bifidobacterium dentium BDP_1006, Bifidobacterium lactis xfp, Lactobacillus paraplantarum xpkA and Bifidobacterium breve xfp. In a preferred embodiment, an enzyme having fructose-6-phosphate phosphoketolase activity is selected from the group consisting of Bifidobacterium dentium BDP 1006, Bifidobacterium lactis xfp, Lactobacillus paraplantarum xpkA and Bifidobacterium breve xfp. In another embodiment, the one or more nucleic acid molecules encoding the enzyme having fructose-6-phosphate phosphoketolase activity comprise an amino acid sequence selected from the group consisting of SEQ ID NOs: 212, 214, 216 and 218. In a further embodiment, the one or more nucleic acid molecule encoding the enzyme having fructose-6-phosphate phosphoketolase activity is encoded by a nucleic acid sequence selected from the group consisting of SEQ ID NOs: 211, 213, 215 and 217.

[0019] In some embodiments, the recombinant microorganism comprises the expression of at least one enzyme having phosphate acetyltransferase activity. In some embodiments, an enzyme having phosphate acetyltransferase activity is encoded by an amino acid sequence having at least 70% sequence identity, at least 80% sequence identity, or at least 90% sequence identity to an enzyme having phosphate acetyltransferase activity selected from E. coli pta and Clostridium acetobutylicum pta. In a preferred embodiment, an enzyme having phosphate acetyltransferase activity is selected from E. coli pta and Clostridium acetobutylicum pta. In another embodiment, the one or more nucleic acid molecules encoding the enzyme having phosphate acetyltransferase activity comprise an amino acid sequence selected from SEQ ID NOs: 220 and 222. In a further embodiment, the one or more nucleic acid molecule encoding the enzyme having phosphate acetyltransferase activity is encoded by a nucleic acid sequence selected from SEQ ID NOs: 219 and 221.

[0020] In some embodiments, the recombinant microorganism comprises the expression of at least one enzyme having a fructose-6-phosphate phosphoketolase activity, a phosphate acetyltransferase activity, a transketolase activity, a transaldolase activity, a ribulose-5-phosphate 3-epimerase activity, and a ribose-5-phosphate isomerase activity. In other embodiments, the recombinant microorganism further comprises a deleted or diminished activity in an endogenous 6-phosphofructokinase enzyme. In some embodiments, the endogenous 6-phosphofructokinase enzyme is pfkA and/or pfkB.

[0021] In another embodiment, the one or more pentose-5-phosphate intermediate produced in the lossless conversion of one or more hexose feedstock can be connected with any one of the known C2 MEG or glycolic acid production pathways by conversion of the one or more pentose-5-phosphate intermediate to one or more pentose and/or pentose-1-phosphate intermediate. In some embodiments, the recombinant microorganism comprises the expression of at least one enzyme having a pentose phosphatase activity, an arabitol phosphate dehydrogenase activity, and/or a phosphopentomutase activity. In some embodiments, the phosphopentomutase is (Pgm3). In some embodiments, the phosphopentosemutase is Pgm3 from Saccharomyces cerevisiae. In some embodiments, the phosphopentosemutase is encoded by an aminoacid sequence having at least 70% sequence identity, at least 80% sequence identity or at least 90% sequence identity to the Pgm3 from Saccharomyces cerevisiae.

[0022] In some embodiments, the recombinant microorganism comprises the expression of at least one enzyme having pentose phosphatase activity. In other embodiments, the at least one enzyme having pentose phosphatase activity is selected from one or more of an enzyme having D-pentose-5-phosphatase activity, an enzyme having D-xylulose-5-phosphatase activity, an enzyme having D-ribose-5-phosphatase activity, and an enzyme having D-ribulose-5-phosphatase activity. In some embodiments, the pentose phosphatase is encoded by an amino acid sequence having at least 70% sequence identity, at least 80% sequence identity, or at least 90% sequence identity to a D-pentose-5-phosphatase selected from the group consisting of E. coli phoA, E. coli yfbT and E. coli yidA. In some embodiments, the enzyme having D-xylulose-5-phosphatase activity is encoded by an amino acid sequence having at least 70% sequence identity, at least 80% sequence identity, or at least 90% sequence identity to Bacillus subtilis araL. In some embodiments, the enzyme having D-ribose-5-phosphatase activity is encoded by an amino acid sequence having at least 70% sequence identity, at least 80% sequence identity, or at least 90% sequence identity to an enzyme having D-ribose-5-phosphatase activity selected from the group consisting of Arabidopsis thaliana SGPP, Pseudomonas fluorescens PFLU_2693, and E. coli ybiV. In some embodiments, the enzyme having D-ribulose-5-phosphatase activity is encoded by an amino acid sequence having at least 70% sequence identity, at least 80% sequence identity, or at least 90% sequence identity to Plasmodium falciparum PF10_0325. In some embodiments, the one or more nucleic acid molecules encoding the enzyme having D-pentose-5-phosphatase activity is selected from the group consisting of SEQ ID NOs: 159, 161, 163, 165, 167, 169, 171 and 173. In another embodiment, the one or more nucleic acid molecules encoding the enzyme having D-pentose-5-phosphatase activity comprise an amino acid sequence selected from the group consisting of SEQ ID NOs: 160, 162, 164, 166, 168, 170, 172 and 174.

[0023] In some embodiments, the recombinant microorganism comprises the expression of at least one enzyme having arabitol phosphate dehydrogenase activity. In some embodiments, the enzyme having arabitol phosphate dehydrogenase activity is selected from one or more of an enzyme having D-arabitol 1-phosphate 4-dehydrogenase activity, an enzyme having D-arabitol 5-phosphate 2-dehydrogenase activity, an enzyme having D-arabitol 1-phosphate 2-dehydrogenase activity and an enzyme having D-arabitol 5-phosphate 4-dehydrogenase activity.

[0024] In some embodiments, an enzyme having D-arabitol 1-phosphate 4-dehydrogenase activity is encoded by an amino acid sequence having at least 70% sequence identity, at least 80% sequence identity, or at least 90% sequence identity to APDH from Enterococcus avium. In a preferred embodiment, an enzyme having D-arabitol 1-phosphate 4-dehydrogenase activity is APDH from Enterococcus avium. In some embodiments, the one or more nucleic acid molecules encoding an enzyme having D-arabitol 1-phosphate 4-dehydrogenase activity is set forth in SEQ ID NO: 175. In another embodiment, the one or more nucleic acid molecules encoding an enzyme having D-arabitol 1-phosphate 4-dehydrogenase activity comprise an amino acid sequence set forth in SEQ ID NO: 176.

[0025] In some embodiments, an enzyme having D-arabitol 5-phosphate 2-dehydrogenase activity is encoded by an amino acid sequence having at least 70% sequence identity, at least 80% sequence identity, or at least 90% sequence identity to APDH from Enterococcus avium. In a preferred embodiment, an enzyme having D-arabitol 5-phosphate 2-dehydrogenase activity is APDH from Enterococcus avium. In some embodiments, the one or more nucleic acid molecules encoding an enzyme having D-arabitol 5-phosphate 2-dehydrogenase activity is set forth in SEQ ID NO: 175. In another embodiment, the one or more nucleic acid molecules encoding an enzyme having D-arabitol 5-phosphate 2-dehydrogenase activity comprise an amino acid sequence set forth in SEQ ID NO: 176.

[0026] In some embodiments, an enzyme having D-arabitol 1-phosphate 2-dehydrogenase activity is encoded by an amino acid sequence having at least 70% sequence identity, at least 80% sequence identity, or at least 90% sequence identity to an enzyme having D-arabitol 1-phosphate 2-dehydrogenase activity selected from the group consisting of Candida albicans ARD1, Candida tropicalis ARD1, Scheffersomyces stipitis ARDH, Bacillus subtilis egsA (araM), Aeropyrum pernix egsA, E. coli gpsA and Saccharomyces cerevisiae GPD1. In a preferred embodiment, an enzyme having D-arabitol 1-phosphate 2-dehydrogenase activity is selected from the group consisting of Candida albicans ARD1, Candida tropicalis ARD1, Scheffersomyces stipitis ARDH, Bacillus subtilis egsA (araM), Aeropyrum pernix egsA, E. coli gpsA and Saccharomyces cerevisiae GPD1. In some embodiments, the one or more nucleic acid molecules encoding an enzyme having D-arabitol 1-phosphate 2-dehydrogenase activity is selected from the group consisting of SEQ ID NOs: 177, 179, 181, 189, 191, 193 and 195. In another embodiment, the one or more nucleic acid molecules encoding an enzyme having D-arabitol 1-phosphate 2-dehydrogenase activity comprise an amino acid sequence selected from the group consisting of SEQ ID NOs: 178, 180, 182, 190, 192, 194 and 196.

[0027] In some embodiments, an enzyme having D-arabitol 5-phosphate 4-dehydrogenase activity is encoded by an amino acid sequence having at least 70% sequence identity, at least 80% sequence identity, or at least 90% sequence identity to an enzyme having D-arabitol 5-phosphate 4-dehydrogenase activity selected from the group consisting of Pseudomonas fluorescens mtlD, Klebsiella pneumoniae dalD, Ralstonia solanacearum dalD, Bacillus subtilis egsA (araM), Aeropyrum pernix egsA, E. coli gpsA and Saccharomyces cerevisiae GPD1. In a preferred embodiment, an enzyme having D-arabitol 5-phosphate 4-dehydrogenase activity is selected from the group consisting of Pseudomonas fluorescens mtlD, Klebsiella pneumoniae dalD, Ralstonia solanacearum dalD, Bacillus subtilis egsA (araM), Aeropyrum pernix egsA, E. coli gpsA and Saccharomyces cerevisiae GPD1. In some embodiments, the one or more nucleic acid molecules encoding an enzyme having D-arabitol 5-phosphate 4-dehydrogenase activity is selected from the group consisting of SEQ ID NOs: 183, 185, 187, 189, 191, 193 and 195. In another embodiment, the one or more nucleic acid molecules encoding an enzyme having D-arabitol 5-phosphate 4-dehydrogenase activity comprise an amino acid sequence selected from the group consisting of SEQ ID NOs: 184, 186, 188, 190, 192, 194 and 196.

[0028] In some embodiments, the recombinant microorganism comprises the expression of at least one enzyme having phosphopentomutase activity. In some embodiments, an enzyme having phosphopentomutase activity is encoded by an amino acid sequence having at least 70% sequence identity, at least 80% sequence identity, or at least 90% sequence identity to an enzyme having phosphopentomutase activity selected from the group consisting of E. coli deoB, E. coli pgm, Bacillus subtilis pgcA, Lactococcus lactis pgmB, E. coli ycjU, Pseudomonas aeruginosa algC, and E. coli cpsG. In a preferred embodiment, an enzyme having phosphopentomutase activity is selected from the group consisting of E. coli deoB, E. coli pgm, Bacillus subtilis pgcA, Lactococcus lactis pgmB, E. coli ycjU, Pseudomonas aeruginosa algC, and E. coli cpsG. In some embodiments, the one or more nucleic acid molecules encoding an enzyme having phosphopentomutase activity is selected from the group consisting of SEQ ID NOs: 197, 199, 201, 203, 205, 207 and 209. In another embodiment, the one or more nucleic acid molecules encoding an enzyme having phosphopentomutase activity comprise an amino acid sequence selected from the group consisting of SEQ ID NOs: 198, 200, 202, 204, 206, 208 and 210.

[0029] In some embodiments of any of the recombinant microorganisms described above, the recombinant microorganism further comprises a diminished activity in one or more endogenous enzymes selected from glucose 6-phosphate-1-dehydrogenase, 6-phosphogluconolactonase, and 6-phosphogluconate dehydrogenase. In further embodiments, the glucose 6-phosphate-1-dehydrogenase is zwf, the 6-phosphogluconolactonase is pgl, and the 6-phosphogluconate dehydrogenase is gnd.

[0030] In some embodiments, the application provides for a recombinant microorganism that co-produces MEG (or glycolic acid) and one or more co-product selected from acetone, isopropanol, propene, isobutene and one or more serine pathway compounds. In some preferred embodiments, the one or more serine pathway compounds is selected from serine, glycine, monoethanolamine (MEA) and ethylenediamine (EDA).

[0031] In some embodiments, the one or more hexose feedstock is selected from glucose or oligomers of glucose thereof. In other embodiments, the oligomers of glucose are selected from fructose, sucrose, starch, cellobiose, maltose, lactose and cellulose.

[0032] In some embodiments, the expression of an enzyme having transketolase activity or an enzyme having fructose-6-phosphate phosphoketolase activity in the recombinant microorganism enables a lossless conversion of one or more hexose feedstock to one or more pentose-5-phosphate intermediate.

[0033] In some embodiments, the recombinant microorganism produces MEG or glycolic acid (GA) through the conversion of glycolaldehyde in a C2 pathway and through the conversion of dihydroxyacetone phosphate (DHAP) or pyruvate in a C3 pathway. In other embodiments, the glycolaldehyde is oxidized to glycolic acid by a glycolaldehyde dehydrogenase.

[0034] In some embodiments, the at least one enzyme for the production of MEG or GA through the conversion of DHAP or pyruvate in a C3 pathway are selected from at least one enzyme having an activity selected from a 3-phosphoglycerate dehydrogenase activity, a phosphoserine aminotransferase activity, a 3-phosphohydroxypyruvate phosphatase activity, a phosphoserine phosphatase activity, a serine transaminase activity, a hydroxypyruvate decarboxylase activity, a 3-phosphohydroxypyruvate reductase activity, a glycolaldehyde reductase activity, a glycolaldehyde dehydrogenase activity, a serine oxidoreductase (deaminating) or serine-pyruvate aminotransferase activity, a serine decarboxylase activity, an ethanolamine aminotransferase or ethanolamine oxidoreductase (deaminating) activity, a glycerate decarboxylase activity, a hydroxypyruvate reductase activity, a 3-phosphoglycerate phosphatase activity, a 2-phosphoglycerate phosphatase activity, a glycerate 3-kinase activity, and a glycerate 2-kinase activity.

[0035] In some embodiments, the recombinant microorganism produces MEG or glycolic acid (GA) through the conversion of glycolaldehyde in a C2 pathway and produces one or more co-product through the conversion of dihydroxyacetone phosphate (DHAP) or pyruvate in a C3 pathway. In other embodiments, the one or more co-product is selected from acetone, isopropanol, propene, isobutene and one or more serine pathway compounds. In some preferred embodiments, the one or more serine pathway compounds is selected from serine, glycine, monoethanolamine (MEA) and ethylenediamine (EDA).

[0036] In some embodiments, the at least one enzyme for the production of one or more co-product through the conversion of DHAP or pyruvate in a C3 pathway are selected from at least one enzyme having an activity selected from a thiolase or acetyl coenzyme A acetyltransferase activity, an acetyl-CoA:acetoacetate transferase or acetate:acetoacetyl-CoA hydrolase activity, and an acetoacetate decarboxylase activity, and the one or more co-product comprises acetone.

[0037] In some embodiments, the at least one enzyme for the production of one or more co-product through the conversion of DHAP or pyruvate in a C3 pathway are selected from at least one enzyme having an activity selected from a thiolase or acetyl coenzyme A acetyltransferase activity, an acetyl-CoA:acetoacetate transferase or acetate:acetoacetyl-CoA hydrolase activity, an acetoacetate decarboxylase activity, and a secondary alcohol dehydrogenase activity, and the one or more co-product comprises isopropanol.

[0038] In some embodiments, the at least one enzyme for the production of one or more co-product through the conversion of DHAP or pyruvate in a C3 pathway are selected from at least one enzyme having an activity selected from a thiolase or acetyl coenzyme A acetyltransferase activity, an acetyl-CoA:acetoacetate transferase or acetate:acetoacetyl-CoA hydrolase activity, an acetoacetate decarboxylase activity, a secondary alcohol dehydrogenase activity, and a dehydratase activity, and the one or more co-product comprises propene.

[0039] In some embodiments, the at least one enzyme for the production of one or more co-product through the conversion of DHAP or pyruvate in a C3 pathway are selected from at least one enzyme having an activity selected from a thiolase or acetyl coenzyme A acetyltransferase activity, an acetyl-CoA:acetoacetate transferase or acetate:acetoacetyl-CoA hydrolase activity, an acetoacetate decarboxylase activity, a 3-hydroxyisovalerate (3HIV) synthase activity, a hydroxymethylglutaryl-CoA synthase activity, a methylglutaconyl-CoA hydratase activity, a methylcrotonyl-CoA carboxylase activity, a methylcrotonyl-CoA hydratase activity, a 3-hydroxyisovaleryl-CoA thioesterase activity, a 3HIV kinase activity, a 3HIV-3-phosphate decarboxylase activity, and a 3HIV decarboxylase activity, and the one or more co-product comprises isobutene.

[0040] In some embodiments, the at least one enzyme for the production of one or more co-product through the conversion of DHAP or pyruvate in a C3 pathway are selected from at least one enzyme having an activity selected from a 3-phosphoglycerate dehydrogenase activity, a phosphoserine aminotransferase activity, a 3-phosphohydroxypyruvate phosphatase activity, a phosphoserine phosphatase activity, a serine oxidoreductase (deaminating) or serine-pyruvate aminotransferase activity, a hydroxypyruvate reductase activity, a 3-phosphoglycerate phosphatase activity, a 2-phosphoglycerate phosphatase activity, a glycerate 3-kinase activity, and a glycerate 2-kinase activity, and wherein the one or more co-product comprises L-serine.

[0041] In some embodiments, the at least one enzyme for the production of one or more co-product through the conversion of DHAP or pyruvate in a C3 pathway are selected from at least one enzyme having an activity selected from a serine hydroxymethyltransferase activity, a transferase activity, a formaldehyde dehydrogenase activity, a formate dehydrogenase activity, an activity associated with glycine cleavage system, a 3-phosphoglycerate dehydrogenase activity, a phosphoserine aminotransferase activity, a 3-phosphohydroxypyruvate phosphatase activity, a phosphoserine phosphatase activity, a serine transaminase activity, a hydroxypyruvate decarboxylase activity, a serine oxidoreductase (deaminating) activity, a serine decarboxylase activity, an ethanolamine aminotransferase or ethanolamine oxidoreductase (deaminating) activity, a hydroxypyruvate reductase activity, a 3-phosphoglycerate phosphatase activity, a 2-phosphoglycerate phosphatase activity, a glycerate 3-kinase activity, a glycerate 2-kinase activity, a glycolaldehyde dehydrogenase activity, a glycolate dehydrogenase activity, an alanine-glyoxylate aminotransferase activity, an alanine transaminase activity, an NAD(P)H dependent glutamate dehydrogenase activity, and wherein the one or more co-product comprises glycine. In another embodiment, the activity associated with glycine cleavage system comprise an enzyme or protein selected from a glycine decarboxylase (P protein), an aminomethyltransferase (T protein), a dihydrolipoamide dehydrogenase (L protein), and an H protein.

[0042] In some embodiments, the at least one enzyme for the production of one or more co-product through the conversion of DHAP or pyruvate in a C3 pathway are selected from at least one enzyme having an activity selected from a 3-phosphoglycerate dehydrogenase activity, a phosphoserine aminotransferase activity, a 3-phosphohydroxypyruvate phosphatase activity, a phosphoserine phosphatase activity, a transaminase activity, a hydroxypyruvate decarboxylase activity, a serine oxidoreductase (deaminating) or serine-pyruvate aminotransferase activity, a serine decarboxylase activity, a hydroxypyruvate reductase activity, a 3-phosphoglycerate phosphatase activity, a 2-phosphoglycerate phosphatase activity, a glycerate 3-kinase activity, a glycerate 2-kinase activity, an acetaldehyde dehydrogenase activity, and an ethanolamine ammonia lyase activity, and the one or more co-product comprises monoethanolamine (MEA).

[0043] In some embodiments, the at least one enzyme for the production of one or more co-product through the conversion of DHAP or pyruvate in a C3 pathway are selected from at least one enzyme having an activity selected from a serine dehydrogenase activity, a 2-aminomalonate semialdehyde decarboxylase activity, an aminoacetaldehyde transaminase activity, a 2-aminomalonate semialdehyde transaminase activity, a 2,3-diaminopropanoate decarboxylase activity, a serine decarboxylase activity, an ethanolamine dehydrogenase activity, a serine hydroxymethyltransferase activity, an aldehyde oxidase activity, an N-acetyl transferase or O-acetyl transferase activity, an N-acetylserine dehydrogenase activity, a transaminase activity, a deacetylase activity, a serine aminase activity, and a 2,3-diaminopropanoate ammonia lyase activity, and the one or more co-product comprises ethylenediamine (EDA).

[0044] In some embodiments, the at least one enzyme for the production of MEG or GA from glycolaldehyde in a C2 pathway are selected from at least one enzyme having an activity selected from a D-tagatose 3-epimerase activity, a D-ribulokinase activity, a D-ribulose-1-phosphate aldolase activity, a D-xylulose 1-kinase activity, a D-xylulose-1-phosphate aldolase activity, a xylose reductase or aldose reductase activity, a xylitol dehydrogenase activity, a xylose isomerase activity, a xylose dehydrogenase activity, a xylonolactonase activity, a xylonate dehydrogenase activity, a 2-keto-3-deoxy-D-pentonate aldolase activity, a glycolaldehyde reductase activity and a glycolaldehyde dehydrogenase activity. In some embodiments, the enzyme having D-xylulose-1-phosphate aldolase activity is aldoB. In some embodiments, the enzyme having D-ribulose-1-phosphate aldolase activity is fucA.

[0045] In some embodiments of any of the recombinant microorganisms described above, the recombinant microorganism further comprises one or more modifications to diminish or delete activity in a glycolaldehyde dehydrogenase, a lactate dehydrogenase, a xylose isomerase, a xylulose kinase or combination thereof.

[0046] In one embodiment, at least a portion of the excess NADH produced in the C3 pathway is used as a source of reducing equivalents in the C2 pathway. In another embodiment, at least a portion of the excess NADH produced in the C3 pathway is used to produce ATP.

[0047] In one embodiment, excess biomass formation is minimized and production of MEG (or glycolic acid) or MEG (or glycolic acid) and one or more co-products is maximized.

[0048] In another aspect, the application provides for a method of producing MEG or glycolic acid (GA) using a recombinant microorganism of any of the above embodiments, wherein the method comprises cultivating the recombinant microorganism in a culture medium containing one or more hexose feedstock providing a carbon source until the MEG or GA is produced. In some embodiments, one or more co-product is co-produced with MEG or GA. In further embodiments, the one or more co-product is selected from acetone, isopropanol, propene, isobutene and one or more serine pathway compound. In yet further embodiments, the one or more serine pathway compound is selected from serine, glycine, monoethanolamine (MEA) and ethylenediamine (EDA).

[0049] In yet another aspect, a method of producing a recombinant microorganism that produces or accumulates MEG or glycolic acid (GA) from one or more exogenous hexose feedstock via one or more pentose-5-phosphate intermediate, comprising: introducing into or expressing in the recombinant microorganism one or more enzyme for the conversion of the one or more hexose feedstock to the one or more pentose-5-phosphate intermediate; introducing into or expressing in the recombinant microorganism one or more enzyme for the conversion of the one or more pentose-5-phosphate intermediate to one or more pentose or pentose-1-phosphate intermediate; introducing into or expressing in the recombinant microorganism one or more C2 pathway comprising one or more enzyme for the production of MEG or GA from glycolaldehyde; and introducing into or expressing in the recombinant microorganism one or more C3 pathway comprising one or more enzyme for the production of MEG or GA derived from DHAP or pyruvate; and culturing the recombinant microorganism in a culture medium containing the one or more hexose feedstock to produce or accumulate MEG or GA, wherein glycolaldehyde and DHAP (or pyruvate) are intermediates produced in the C2 pathway, and wherein MEG or GA are produced in both the C2 and C3 pathways.

[0050] In some embodiments, the application provides for a method of producing a recombinant microorganism that produces or accumulates MEG or glycolic acid (GA) and one or more co-product from one or more exogenous hexose feedstock via one or more pentose-5-phosphate intermediate, comprising: introducing into or expressing in the recombinant microorganism one or more enzyme for the conversion of the one or more hexose feedstock to the one or more pentose-5-phosphate intermediate; introducing into or expressing in the recombinant microorganism one or more enzyme for the conversion of the one or more pentose-5-phosphate intermediate to one or more pentose or pentose-1-phosphate intermediate; introducing into or expressing in the recombinant microorganism one or more C2 pathway comprising one or more enzyme for the production of MEG or GA from glycolaldehyde; and introducing into or expressing in the recombinant microorganism one or more C3 pathway comprising one or more enzyme for the production of one or more co-product derived from DHAP or pyruvate; and culturing the recombinant microorganism in a culture medium containing the one or more hexose feedstock to produce or accumulate MEG or GA and one or more co-product, wherein glycolaldehyde and DHAP (or pyruvate) are intermediates produced in the C2 pathway, and wherein MEG or GA is produced in the one or more C2 pathway and the one or more co-product is produced in the one or more C3 pathway.

### BRIEF DESCRIPTION OF DRAWINGS

[0051] Illustrative embodiments of the disclosure are illustrated in the drawings, in which:

[0052] FIG. 1 illustrates lossless transformation of glucose to a pentose-phosphate. The symbol [symbol] means enzymes to be potentially down regulated or inactivated/abolished, ie. respective gene potentially attenuated or deleted

[0053] FIG. 2 illustrates MEG and possible co-production pathways via D-xylulose-1-phosphate.

[0054] FIG. 3 illustrates MEG and possible co-production pathways via D-xylonate.

[0055] FIG. 4 illustrates MEG and possible co-production pathways via D-ribulose-1-phosphate.

[0056] FIG. 5 illustrates a scheme of options for connecting pentose phosphate pathway and MEG production pathways via pentose phosphatases (PP).

[0057] FIG. 6 illustrates a scheme for producing pentose-1-phosphates and derivatives from the pentose phosphate pathway via arabitol phosphate dehydrogenases (APD).

[0058] FIG. 7 illustrates the isomerization of pentose phosphates mediated by arabitol phosphate dehydrogenases (APD).

[0059] FIG. 8 illustrates a scheme for producing pentose-1-phosphates and derivatives from the pentose phosphate pathway via phosphopentomutases (PPM).

[0060] FIG. 9 illustrates lossless transformation of glucose to pentose phosphates and an acetyl-CoA. The symbol [symbol] means enzymes to be potentially down regulated or inactivated/abolished, ie. respective gene potentially attenuated or deleted.

[0061] FIG. 10 illustrates an overview of the MEG and Ser, Gly, MEA, EDA co-production pathways.

[0062] FIG. 11 illustrates published EDA production pathways. From WO 2014/049382. Reaction F: direct L-serine amination via L-serine aminase. Reaction G: direct pyruvate amination via 2,3-diaminopropionate ammonia lyase.

[0063] FIG. 12 illustrates the biosynthesis pathway of xylitol from glucose with the use of phosphatase. The symbol [symbol] means enzymes to be potentially down regulated or inactivated/abolished, ie. respective gene potentially attenuated or deleted.

[0064] FIG. 13 illustrates the biosynthesis pathway of xylitol from glucose with the use of arabitol-P dehydrogenase (ADP). The symbol [symbol] means enzymes to be potentially down regulated or inactivated/abolished, ie. respective gene potentially attenuated or deleted.

[0065] FIG. 14 illustrates the biosynthesis pathway of xylitol from glucose with the use of phosphopentomutase (PPM). The symbol [symbol] means enzymes to be potentially down regulated or inactivated/abolished, ie. respective gene potentially attenuated or deleted.

[0066] FIG. 15 is a scheme for an in vitro phosphoglucomutase assay on its natural substrate, glucose-1P.

[0067] FIG. 16 is a scheme for in vitro conversion of pentose to glycolic acid precursors through key pentose-5P intermediates acted on by phosphoglucomutase enzymes.

[0068] FIG. 17 is a scheme for in vivo screening of key enzyme candidates for facilitating conversion of pentose sugars to glycolic acid.

[0069] FIG. 18 is a scheme for in vitro conversion of pentose to glycolic acid precursors through key pentose-1P intermediates acted on by aldolase enzymes.

### DETAILED DESCRIPTION

### Definitions

[0070] The following definitions and abbreviations are to be used for the interpretation of the disclosure.

[0071] As used herein and in the appended claims, the singular forms “a,” “an,” and “the” include plural referents unless the context clearly dictates otherwise. Thus, for example, reference to “an enzyme” includes a plurality of such enzymes and reference to “the microorganism” includes reference to one or more microorganisms, and so forth.

[0072] As used herein, the terms “comprises,” “comprising,” “includes,” “including,” “has,” “having, “contains,” “containing,” or any other variation thereof, are intended to cover a non-exclusive inclusion. A composition, mixture, process, method, article, or apparatus that comprises a list of elements is not necessarily limited to only those elements but may include other elements not expressly listed or inherent to such composition, mixture, process, method, article, or apparatus. Further, unless expressly stated to the contrary, “or” refers to an inclusive “or” and not to an exclusive “or.”

[0073] The terms “about” and “around,” as used herein to modify a numerical value, indicate a close range surrounding that explicit value. If “X” were the value, “about X” or “around X” would indicate a value from 0.9X to 1.1X, or, in some embodiments, a value from 0.95X to 1.05X. Any reference to “about X” or “around X” specifically indicates at least the values X, 0.95X, 0.96X, 0.97X, 0.98X, 0.99X, 1.01X, 1.02X, 1.03X, 1.04X, and 1.05X. Thus, “about X” and “around X” are intended to teach and provide written description support for a claim limitation of, e.g., “0.98X.”

[0074] As used herein, the terms “microbial,” “microbial organism,” and “microorganism” include any organism that exists as a microscopic cell that is included within the domains of archaea, bacteria or eukarya, the latter including yeast and filamentous fungi, protozoa, algae, or higher Protista. Therefore, the term is intended to encompass prokaryotic or eukaryotic cells or organisms having a microscopic size and includes bacteria, archaea, and eubacteria of all species as well as eukaryotic microorganisms such as yeast and fungi. Also included are cell cultures of any species that can be cultured for the production of a chemical.

[0075] As described herein, in some embodiments, the recombinant microorganisms are prokaryotic microorganism. In some embodiments, the prokaryotic microorganisms are bacteria. “Bacteria”, or “eubacteria”, refers to a domain of prokaryotic organisms. Bacteria include at least eleven distinct groups as follows: (1) Gram-positive (gram+) bacteria, of which there are two major subdivisions: (1) high G+C group (Actinomycetes, Mycobacteria, Micrococcus, others) (2) low G+C group (Bacillus, Clostridia, Lactobacillus, Staphylococci, Streptococci, Mycoplasmas); (2) Proteobacteria, e.g., Purple photosynthetic +non-photosynthetic Gram-negative bacteria (includes most “common” Gram-negative bacteria); (3) Cyanobacteria, e.g., oxygenic phototrophs; (4) Spirochetes and related species; (5) Planctomyces; (6) Bacteroides, Flavobacteria; (7) Chlamydia; (8) Green sulfur bacteria; (9) Green non-sulfur bacteria (also anaerobic phototrophs); (10) Radioresistant micrococci and relatives; (11) Thermotoga and Thermosipho thermophiles.

[0076] “Gram-negative bacteria” include cocci, nonenteric rods, and enteric rods. The genera of Gram-negative bacteria include, for example, Neisseria, Spirillum, Pasteurella, Brucella, Yersinia, Francisella, Haemophilus, Bordetella, Escherichia, Salmonella, Shigella, Klebsiella, Proteus, Vibrio, Pseudomonas, Bacteroides, Acetobacter, Aerobacter, Agrobacterium, Azotobacter, Spirilla, Serratia, Vibrio, Rhizobium, Chlamydia, Rickettsia, Treponema, and Fusobacterium.

[0077] “Gram positive bacteria” include cocci, nonsporulating rods, and sporulating rods. The genera of gram positive bacteria include, for example, Actinomyces, Bacillus, Clostridium, Corynebacterium, Erysipelothrix, Lactobacillus, Listeria, Mycobacterium, Myxococcus, Nocardia, Staphylococcus, Streptococcus, and Streptomyces.

[0078] The term “recombinant microorganism” and “recombinant host cell” are used interchangeably herein and refer to microorganisms that have been genetically modified to express or to overexpress endogenous enzymes, to express heterologous enzymes, such as those included in a vector, in an integration construct, or which have an alteration in expression of an endogenous gene. By “alteration” it is meant that the expression of the gene, or level of a RNA molecule or equivalent RNA molecules encoding one or more polypeptides or polypeptide subunits, or activity of one or more polypeptides or polypeptide subunits is up regulated or down regulated, such that expression, level, or activity is greater than or less than that observed in the absence of the alteration. For example, the term “alter” can mean “inhibit,” but the use of the word “alter” is not limited to this definition. It is understood that the terms “recombinant microorganism” and “recombinant host cell” refer not only to the particular recombinant microorganism but to the progeny or potential progeny of such a microorganism. Because certain modifications may occur in succeeding generations due to either mutation or environmental influences, such progeny may not, in fact, be identical to the parent cell, but are still included within the scope of the term as used herein.

[0079] The term “expression” with respect to a gene sequence refers to transcription of the gene and, as appropriate, translation of the resulting mRNA transcript to a protein. Thus, as will be clear from the context, expression of a protein results from transcription and translation of the open reading frame sequence. The level of expression of a desired product in a host cell may be determined on the basis of either the amount of corresponding mRNA that is present in the cell, or the amount of the desired product encoded by the selected sequence. For example, mRNA transcribed from a selected sequence can be quantitated by qRT-PCR or by Northern hybridization (see Sambrook et al., Molecular Cloning: A Laboratory Manual, Cold Spring Harbor Laboratory Press (1989)). Protein encoded by a selected sequence can be quantitated by various methods, e.g., by ELISA, by assaying for the biological activity of the protein, or by employing assays that are independent of such activity, such as western blotting or radioimmunoassay, using antibodies that recognize and bind the protein. See Sambrook et al., 1989, supra.

[0080] The term “polynucleotide” is used herein interchangeably with the term “nucleic acid” and refers to an organic polymer composed of two or more monomers including nucleotides, nucleosides or analogs thereof, including but not limited to single stranded or double stranded, sense or antisense deoxyribonucleic acid (DNA) of any length and, where appropriate, single stranded or double stranded, sense or antisense ribonucleic acid (RNA) of any length, including siRNA. The term “nucleotide” refers to any of several compounds that consist of a ribose or deoxyribose sugar joined to a purine or a pyrimidine base and to a phosphate group, and that are the basic structural units of nucleic acids. The term “nucleoside” refers to a compound (as guanosine or adenosine) that consists of a purine or pyrimidine base combined with deoxyribose or ribose and is found especially in nucleic acids. The term “nucleotide analog” or “nucleoside analog” refers, respectively, to a nucleotide or nucleoside in which one or more individual atoms have been replaced with a different atom or with a different functional group. Accordingly, the term polynucleotide includes nucleic acids of any length, DNA, RNA, analogs and fragments thereof. A polynucleotide of three or more nucleotides is also called nucleotidic oligomer or oligonucleotide.

[0081] It is understood that the polynucleotides described herein include “genes” and that the nucleic acid molecules described herein include “vectors” or “plasmids.” Accordingly, the term “gene”, also called a “structural gene” refers to a polynucleotide that codes for a particular sequence of amino acids, which comprise all or part of one or more proteins or enzymes, and may include regulatory (non-transcribed) DNA sequences, such as promoter sequences, which determine for example the conditions under which the gene is expressed. The transcribed region of the gene may include untranslated regions, including introns, 5′-untranslated region (UTR), and 3′-UTR, as well as the coding sequence.

[0082] The term “enzyme” as used herein refers to any substance that catalyzes or promotes one or more chemical or biochemical reactions, which usually includes enzymes totally or partially composed of a polypeptide or polypeptides, but can include enzymes composed of a different molecule including polynucleotides.

[0083] As used herein, the term “non-naturally occurring,” when used in reference to a microorganism organism or enzyme activity of the disclosure, is intended to mean that the microorganism organism or enzyme has at least one genetic alteration not normally found in a naturally occurring strain of the referenced species, including wild-type strains of the referenced species. Genetic alterations include, for example, modifications introducing expressible nucleic acids encoding metabolic polypeptides, other nucleic acid additions, nucleic acid deletions and/or other functional disruption of the microorganism's genetic material. Such modifications include, for example, coding regions and functional fragments thereof, for heterologous, homologous, or both heterologous and homologous polypeptides for the referenced species. Additional modifications include, for example, non-coding regulatory regions in which the modifications alter expression of a gene or operon. Exemplary non-naturally occurring microorganism or enzyme activity includes the hydroxylation activity described above.

[0084] The term “exogenous” as used herein with reference to various molecules, e.g., polynucleotides, polypeptides, enzymes, etc., refers to molecules that are not normally or naturally found in and/or produced by a given yeast, bacterium, organism, microorganism, or cell in nature.

[0085] On the other hand, the term “endogenous” or “native” as used herein with reference to various molecules, e.g., polynucleotides, polypeptides, enzymes, etc., refers to molecules that are normally or naturally found in and/or produced by a given yeast, bacterium, organism, microorganism, or cell in nature.

[0086] The term “heterologous” as used herein in the context of a modified host cell refers to various molecules, e.g., polynucleotides, polypeptides, enzymes, etc., wherein at least one of the following is true: (a) the molecule(s) is/are foreign (“exogenous”) to (i.e., not naturally found in) the host cell; (b) the molecule(s) is/are naturally found in (e.g., is “endogenous to”) a given host microorganism or host cell but is either produced in an unnatural location or in an unnatural amount in the cell; and/or (c) the molecule(s) differ(s) in nucleotide or amino acid sequence from the endogenous nucleotide or amino acid sequence(s) such that the molecule differing in nucleotide or amino acid sequence from the endogenous nucleotide or amino acid as found endogenously is produced in an unnatural (e.g., greater than naturally found) amount in the cell.

[0087] The term “homolog,” as used herein with respect to an original enzyme or gene of a first family or species, refers to distinct enzymes or genes of a second family or species which are determined by functional, structural, or genomic analyses to be an enzyme or gene of the second family or species which corresponds to the original enzyme or gene of the first family or species. Homologs most often have functional, structural, or genomic similarities. Techniques are known by which homologs of an enzyme or gene can readily be cloned using genetic probes and PCR. Identity of cloned sequences as homologs can be confirmed using functional assays and/or by genomic mapping of the genes.

[0088] A protein has “homology” or is “homologous” to a second protein if the amino acid sequence encoded by a gene has a similar amino acid sequence to that of the second gene. Alternatively, a protein has homology to a second protein if the two proteins have “similar” amino acid sequences. Thus, the term “homologous proteins” is intended to mean that the two proteins have similar amino acid sequences. In certain instances, the homology between two proteins is indicative of its shared ancestry, related by evolution. The terms “homologous sequences” or “homologs” are thought, believed, or known to be functionally related. A functional relationship may be indicated in any one of a number of ways, including, but not limited to: (a) degree of sequence identity and/or (b) the same or similar biological function. Preferably, both (a) and (b) are indicated. The degree of sequence identity may vary, but in one embodiment, is at least 50% (when using standard sequence alignment programs known in the art), at least 60%, at least 65%, at least 70%, at least 75%, at least 80%, at least 85%, at least 90%, at least about 91%, at least about 92%, at least about 93%, at least about 94%, at least about 95%, at least about 96%, at least about 97%, at least about 98%, or at least 98.5%, or at least about 99%, or at least 99.5%, or at least 99.8%, or at least 99.9%. Homology can be determined using software programs readily available in the art, such as those discussed in Current Protocols in Molecular Biology (F. M. Ausubel et al., eds., 1987) Supplement 30, section 7.718, Table 7.71. Some alignment programs are MacVector (Oxford Molecular Ltd, Oxford, U.K.) and ALIGN Plus (Scientific and Educational Software, Pennsylvania). Other non-limiting alignment programs include Sequencher (Gene Codes, Ann Arbor, Mich.), AlignX, and Vector NTI (Invitrogen, Carlsbad, Calif.). A similar biological function may include, but is not limited to: catalyzing the same or similar enzymatic reaction; having the same or similar selectivity for a substrate or co-factor; having the same or similar stability; having the same or similar tolerance to various fermentation conditions (temperature, pH, etc.); and/or having the same or similar tolerance to various metabolic substrates, products, by-products, intermediates, etc. The degree of similarity in biological function may vary, but in one embodiment, is at least 1%, at least 2%, at least 3%, at least 4%, at least 5%, at least 6%, at least 7%, at least 8%, at least 9%, at least 10%, at least 20%, at least 30%, at least 40%, at least 50%, at least 60%, at least 65%, at least 70%, at least 75%, at least 80%, at least 85%, at least 90%, at least about 91%, at least about 92%, at least about 93%, at least about 94%, at least about 95%, at least about 96%, at least about 97%, at least about 98%, or at least 98.5%, or at least about 99%, or at least 99.5%, or at least 99.8%, or at least 99.9%, according to one or more assays known to one skilled in the art to determine a given biological function.

[0089] The term “variant” refers to any polypeptide or enzyme described herein. A variant also encompasses one or more components of a multimer, multimers comprising an individual component, multimers comprising multiples of an individual component (e.g., multimers of a reference molecule), a chemical breakdown product, and a biological breakdown product. In particular, non-limiting embodiments, an enzyme may be a “variant” relative to a reference enzyme by virtue of alteration(s) in any part of the polypeptide sequence encoding the reference enzyme. A variant of a reference enzyme can have enzyme activity of at least 10%, at least 30%, at least 50%, at least 80%, at least 90%, at least 100%, at least 105%, at least 110%, at least 120%, at least 130% or more in a standard assay used to measure enzyme activity of a preparation of the reference enzyme. In some embodiments, a variant may also refer to polypeptides having at least 50%, at least 60%, at least 70%, at least 80%, at least 90%, at least 91%, at least 92%, at least 93%, at least 94%, at least 95%, at least 96%, at least 97%, at least 98%, or at least 99% sequence identity to the full-length, or unprocessed enzymes of the present disclosure. In some embodiments, a variant may also refer to polypeptides having at least 50%, at least 60%, at least 70%, at least 80%, at least 90%, at least 91%, at least 92%, at least 93%, at least 94%, at least 95%, at least 96%, at least 97%, at least 98%, or at least 99% sequence identity to the mature, or processed enzymes of the present disclosure.

[0090] The term “signal sequence” as used herein refers to an amino acid sequence that targets peptides and polypeptides to cellular locations or to the extracellular environment. Signal sequences are typically at the N-terminal portion of a polypeptide and are typically removed enzymatically. Polypeptides that have their signal sequences are referred to as being full-length and/or unprocessed. Polypeptides that have had their signal sequences removed are referred to as being mature and/or processed.

[0091] The term “yield potential” as used herein refers to a yield of a product from a biosynthetic pathway. In one embodiment, the yield potential may be expressed as a percent by weight of end product per weight of starting compound.

[0092] The term “thermodynamic maximum yield” as used herein refers to the maximum yield of a product obtained from fermentation of a given feedstock, such as glucose, based on the energetic value of the product compared to the feedstock. In a normal fermentation, without use of additional energy sources such as light, hydrogen gas or methane or electricity, for instance, the product cannot contain more energy than the feedstock. The thermodynamic maximum yield signifies a product yield at which all energy and mass from the feedstock is converted to the product. This yield can be calculated and is independent of a specific pathway. If a specific pathway towards a product has a lower yield than the thermodynamic maximum yield, then it loses mass and can most likely be improved upon or substituted with a more efficient pathway towards the product.

[0093] The term “redox balanced” refers to a set of reactions, which taken together produce as much redox cofactors as they consume. Designing metabolic pathways and engineering an organism such that the redox cofactors are balanced or close to being balanced usually results in a more efficient, higher yield production of the desired compounds. Redox reactions always occur together as two half-reactions happening simultaneously, one being an oxidation reaction and the other a reduction reaction. In redox processes, the reductant transfers electrons to the oxidant. Thus, in the reaction, the reductant or reducing agent loses electrons and is oxidized, and the oxidant or oxidizing agent gains electrons and is reduced. In one embodiment, the redox reactions take place in a biological system. Biological energy is frequently stored and released by means of redox reactions. Photosynthesis involves the reduction of carbon dioxide into sugars and the oxidation of water into molecular oxygen. The reverse reaction, respiration, oxidizes sugars to produce carbon dioxide and water. As intermediate steps, the reduced carbon compounds are used to reduce nicotinamide adenine dinucleotide (NAD+), which then contributes to the creation of a proton gradient, which drives the synthesis of adenosine triphosphate (ATP) and is maintained by the reduction of oxygen. The term redox state is often used to describe the balance of GSH/GSSG, NAD+/NADH and NADP+/NADPH in a biological system such as a cell or organ. The redox state is reflected in the balance of several sets of metabolites (e.g., lactate and pyruvate, beta-hydroxybutyrate, and acetoacetate), whose interconversion is dependent on these ratios. An abnormal redox state can develop in a variety of deleterious situations, such as hypoxia, shock, and sepsis.

[0094] The terms “C2 pathway”, “C2 branch pathway”, “C2 biochemical pathway” or “C2 stream” as used herein refers to a biochemical pathway wherein MEG can be produced via glycolaldehyde.

[0095] The terms “C3 pathway”, “C3 branch pathway”, “C3 biochemical pathway” or “C3 stream” as used herein refers to a biochemical pathway wherein MEG and/or one or more co-product such as acetone, isopropanol, propene, isobutene and/or serine pathway compounds can be produced via pyruvate, acetyl-CoA or dihydroxyacetonephosphate (DHAP).

### Introduction

[0096] This disclosure combines the advantages of xylose degradation biochemistry for high yielding MEG (or glycolic acid) or MEG (or glycolic acid) and co-product formation with the advantages of readily available pure hexose sugar feedstocks. It does so by providing a lossless conversion of the hexose glucose to the intermediate D-xylulose-5-phosphate, and further to the pentoses D-xylulose or D-ribulose, to be used as intermediates for the production of MEG (or glycolic acid) or MEG (or glycolic acid) and a co-product by any one of the previously described D-xylose based methods. Apart from glucose, other hexoses such as fructose or hexose oligosaccharides such as starch or sucrose or cellobiose can be used. In some embodiments, hexoses may be selected from D-allose, D-altrose, D-glucose, D-mannose, D-gulose, D-idose, D-galactose, D-talose, D-tagtose, D-sorbose, D-fructose, D-psicose, and other hexoses known in the art. In some embodiments, pentoses may be selected from D-xylose, D-ribose, D-arabinose, D-lyxose, D-xylulose, D-ribulose, and other pentoses known in the art. In some embodiments, the hexoses and pentoses may be selected from the levorotary or dextrorotary entatiomer of any of the hexoses and pentoses disclosed herein.

[0097] Compared to other glucose based MEG or glycolic acid production methods, the present methods solve the following problems: ATP shortage, if co-production is utilized; large NADH excess; low overall product yield potential.

[0098] Compared to other xylose based MEG or glycolic acid production methods, the present methods solve the following challenges and problems: a process depending on xylose (availability/market limitations, price, purity); glucose induced inhibition of xylose utilization.

[0099] Fermentative MEG production is described in WO2010/076324 (or US2011/0294178; Metabolic Explorer), which is herein incorporated in its entirety. This application suggested diol production via 2-ketoacid decarboxylation and reduction, including a serine biosynthesis based pathway to the intermediate hydroxypyruvate and further to ethyleneglycol. However, the disclosed pathway has a reduced total yield potential of 0.69 g_MEG/g_glucose, while the thermodynamic maximum yield for a glucose→MEG conversion is 0.82 g/g. This pathway is also not redox balanced and has a high excess of 2 mol NADH per mol of consumed glucose, all of which needs to be re-oxidized for the cell to be viable. In an aerobic fermentation, this NADH can be used to generate ATP, which however would be in high excess (2 NADH→6 ATP), leading to excess biomass formation during the production phase and therefore reduced product formation and yield.

[0100] Thus, the fermentative MEG production pathway disclosed in WO2010/076324 has an ATP shortage (−1ATP per MEG), excess NADH (+1 NADH per MEG), low yield potential (ymax=0.69 g_MEG/g_glucose) and is a challenging pathway that has not been demonstrated at high efficiency/productivity.

[0101] The disclosure of WO2011/130378A1 (or US2011/0312049; Genomatica) proposes an approach similar to WO2010/076324 to produce MEG from glucose via hydroxypyruvate, but also mentions pathway variations with alternative, but related key intermediates glycerate or ethanolamine.

[0102] The disclosure of WO2011/130378A1 has the same drawbacks as WO2010/076324, except for ATP shortage. ATP can be +0 or +1 per MEG, depending on utilized enzymes.

[0103] In the case of glycolic acid, the described pathways from glucose also go through 3-phosphoglycerate and serine pathway reactions, or via the glyoxylate shunt. In both cases, one CO₂ is lost per glycolic acid, leading to a maximum yield (0.84 g/g) much lower than the thermodynamic maximum yield potential (1.7 g/g).

[0104] A demonstrated fermentative production of MEG from xylose (WO2013/126721), via ribulose-1-phosphate, has a high yield potential (0.82 g_MEG/g_xylose) which equals the thermodynamic maximum yield. It produces MEG via two different pathways which are active in parallel, a 2-carbon stream (via glycolaldehyde) and a 3-carbon stream (via dihydroxyacetonephosphate). The C2 stream is easy to implement, but the C3 stream is difficult to implement at high efficiency via metabolic engineering. The C3 stream utilizes the pathways presented in WO2010/076324 or WO2011/130378.

[0105] Assuming a typically ATP driven xylose import, the overall process is at least ATP neutral. Thus, some xylose and therefore yield will be lost in order to obtain some surplus ATP required for cell growth and maintenance.

[0106] However, the uptake of xylose is not as efficient and fast as that of glucose, the preferred carbon source of most microorganisms. Also, presence of glucose in the media usually inhibits utilization of other sugars such as xylose. For a more efficient process, the organism's regulation leading to this preferential consumption needs to be disrupted and the strain adapted towards xylose preference or sugar co-consumption.

[0107] The key challenge, however, is obtaining xylose as affordable and clean feedstock. Xylose as pure chemical is expensive and not available in bulk quantities. Xylose in hemicellulose hydrolysates is available in larger quantities and at potentially lower cost than glucose, but is accompanied by many impurities and substances that inhibit fermentations.

[0108] Therefore, the fermentative production of MEG (or glycolic acid) from xylose (WO2013/126721) poses a challenge with respect to using xylose as feedstock (availability, price, purity, inhibition of xylose utilization by glucose) and to using a C3 pathway, which has not been demonstrated at high efficiency/productivity. Moreover, there is an ATP shortage, +0ATP (or −1ATP if not using glycerate kinase), which is not sufficient for cell maintenance.

[0109] A further demonstrated fermentative production of MEG from xylose (Alkim et al., Microb Cell Fact (2015) 14:127), via xylulose-1-phosphate, is very similar to the route described by WO2013/126721. It has the same high yield potential (0.82 g/g), difficult to implement C3 stream for MEG production via DHAP, ATP shortage and feedstock challenges.

[0110] Another demonstrated fermentative production of MEG from xylose (WO2013/119020), via xylonate, shares similarities to the route described by WO2013/126721. It produces glycolaldehyde and pyruvate as key intermediates, allowing MEG production from glycolaldehyde with a yield potential of 0.41 g/g. This represents a high relative yield since it is achieved with only half the flux. However, no pathway to convert the remaining pyruvate to MEG is presented in WO2013/119020 or elsewhere. Currently, no realistic and efficient pathway is known to convert pyruvate to MEG. While pyruvate as a co-product itself would enable a redox neutral overall process (+0 NADH), it is not an economically interesting product and the process would lack 1 ATP (probably ˜2 ATP more for pyruvate export). Thus, ideally a pyruvate derived, economically interesting co-product at high yield is required that delivers surplus ATP. Therefore, the fermentative production of MEG from xylose (WO2013/119020), via xylonate, poses a challenge with respect to using xylose as feedstock (availability, price, purity, inhibition of xylose utilization by glucose), low absolute yield of MEG, ATP shortage (depending on co-product, it could be −1 to −3 ATP with pyruvate), and to requiring a pyruvate derived co-product with high yield potential and surplus ATP.

[0111] U.S. Application No. 62/305,814, U.S. Application No. 62/430,742 and U.S. Application No. 62/406,684, each of which is herein incorporated in its entirety, describe high yielding, easy to implement pathways for the co-production of MEG and compounds such as acetone, isopropanol (IPA), propene or isobutene and offer solutions to most of the challenges described for the above mentioned MEG production methods. They furthermore offer solutions for challenges encountered for previously described IPA or isobutene productions from glucose.

[0112] All currently known MEG (or glycolic acid) production methods using glucose as feedstock have low yield potential. This is an intrinsic drawback of the biochemistry of how glucose is degraded to MEG, with one decarboxylation occurring per produced MEG (or glycolic acid) molecule for all the proposed and known pathways. However, one decarboxylation per MEG is too much to achieve redox-neutral and therefore optimal yield.

[0113] All the presented MEG (or glycolic acid) production methods using xylose as feedstock have high or high relative yield potential, due to utilization of specific, beneficial xylose degradation biochemistry, leading to or close to an ideal 0.5 decarboxylation reactions per MEG molecule. However, all these methods share the challenges of using xylose as a feedstock, such as its market limitations and technical challenges from feedstock impurity.

[0114] The present disclosure combines the advantages of xylose degradation biochemistry for high yielding MEG (or glycolic acid), or optionally, MEG (or glycolic acid) and one or more co-product, formation with the advantages of readily available pure hexose sugar feedstocks. It does so by providing a lossless conversion of the hexose glucose to the intermediate D-xylulose-5-phosphate, and further to the pentoses D-xylulose or D-ribulose, to be used as intermediates for the production of MEG (or glycolic acid), or optionally, MEG (or glycolic acid) and one or more co-product, by any one of the previously described D-xylose based methods. Glycolic acid (GA) can be produced instead of MEG by oxidation of glycolaldehyde. Apart from glucose, other hexoses such as fructose or hexose oligosaccharides such as starch or sucrose can be used.

[0115] Compared to other glucose based MEG (or glycolic acid) production methods, the recombinant microorganisms and methods of the present disclosure solves: the problem of ATP shortage, if co-production is utilized; the problem of large NADH excess; the problem of low overall product yield potential.

[0116] Compared to other xylose based MEG (or glycolic acid) production methods, the recombinant microorganisms and methods of the present disclosure solves the challenges of a process depending on xylose (availability/market limitations, price, purity) and the problem of glucose induced inhibition of xylose utilization.

[0117] The present disclosure relates to the production of MEG, or optionally, MEG and one or more co-product, from a hexose, preferably in E. coli. Alternatively, glycolic acid (GA) can be produced instead of MEG by oxidation of glycolaldehyde.

[0118] If glucose is utilized by glycolysis, the standard degradation pathway of E. coli and most other organisms, it will be degraded via 3-phosphoglycerate, the common key intermediate for all glucose to MEG methods described so far. However, this 3-carbon compound is degraded to one 2-carbon compound (MEG), losing one CO₂ per MEG, which is true for all described pathway variations, where NADH is in excess and means significant loss of yield potential (only 0.69 g_MEG per gram of sugar, vs 0.82 g_MEG thermodynamic maximum yield potential).

[0119] Utilization of a Non-Oxidative Entry into Pentose Phosphate Pathway

[0120] In the present disclosure, glucose flux is funneled into the pentose phosphate pathway instead of the glycolysis pathway (FIG. 1). A transketolase, such as encoded by tktA or tktB from E. coli, is used as a non-oxidative entry into the pentose phosphate pathway to transform the glycolysis intermediates fructose-6-phosphate and glyceraldehyde-3-phosphate into D-xylulose-5-phosphate and D-erythrose-4-phosphate (FIG. 1). This produces the key intermediate D-xylulose-5-phosphate.

[0121] Alternatively, a fructose 6-phosphate phosphoketolase (Fpk) and a phosphate acetyltransferase (PTA) can be used as entry into the pentose phosphate pathway, making one erythrose-4-phosphate and one acetyl-CoA from fructose-6-phosphate (FIG. 9).

[0122] Utilization of Pentose Phosphate Pathway for Full Conversion into Pentose Intermediates

[0123] For a lossless conversion of all hexose carbons into a pentose intermediate, D-erythrose-4-phosphate needs to be further processed. A transaldolase, such as encoded by talA or talB from E. coli, catalyzes the conversion of D-erythrose-4-phosphate and D-fructose-6-phosphate to generate D-seduheptulose-7-phosphate and D-glyceraldehyde-3-phosphate. These intermediates are further processed by a transketolase, such as encoded by tktA or tktB from E. coli, to generate D-ribose-5-phosphate and D-xylulose-5-phosphate. D-ribose-5-phosphate can be readily converted into D-ribulose-5-phosphate and further to D-xylulose-5-phosphate via ribose-5-phosphate isomerase (such as encoded by rpiA or rpiB in E. coli) and ribulose-5-phosphate 3-epimerase (such as encoded by rpe in E. coli), respectively. Thus, all glucose or fructose can be converted completely into D-xylulose-5-phosphate. The overall stoichiometry is:

[0124] 2.5 Glucose+2.5 ATP+0.5 Phosphate→2 D-Xylulose-5-Phosphate+D-Ribose-5-Phosphate

[0125] The bidirectional isomerase and epimerase reactions can of course also transform the two produced D-xylulose-5-phosphates and one D-ribose-5-phosphate molecule into three D-ribulose-5-phosphates. The overall net transformation depends lastly on which intermediate, D-xylulose-5-phosphate or D-ribulose-5-phosphate, is actually consumed by the following pathway.

[0126] In case of the alternative entry into the pentose phosphate pathway via Fpk (FIG. 9), the stoichiometry is:

[0127] 2 glucose+2 ATP+CoA->2 D-xylulose-5-phosphate+1 acetyl-CoA

[0128] Optimization of Flux Towards Non-Oxidative Entry into Pentose Phosphate Pathway

[0129] Deactivation of oxidative branch of pentose phosphate pathway

[0130] The common pathway in E. coli, the oxidative entry into the pentose phosphate pathway via 6-phospho D-glucono-1,5-lactone and oxidative decarboxylation to D-ribulose-5-phosphate, should not be utilized, since it transforms the hexose glucose into a pentose with loss of one carbon (FIG. 1). It is advantageous to inhibit at least one or more enzymes catalyzing one or more appropriate reactions in the oxidative branch of the pentose phosphate pathway, namely glucose 6-phosphate-1-dehydrogenase, 6-phosphogluconolactonase, and 6-phosphogluconate dehydrogenase, by deleting one or more of the genes responsible For example, in E. coli, the genes are zwf (glucose 6-phosphate-1-dehydrogenase), pgl (6-phosphogluconolactonase), and gnd (6-phosphogluconate dehydrogenase).

[0131] Downregulation of Glycolysis Downstream Reactions

[0132] The upper part of glycolysis is needed to transform 2.5 glucose or fructose into the key intermediates 2× fructose-6-phosphate and 1× glyceraldehyde-3-phosphate. To reduce or eliminate further flux through the lower part of glycolysis, i.e. the oxidative phosphorylation of glyceraldehyde-3-phosphate to 1,3-bisphospho D-glycerate an its subsequent conversion to 3-phospho-D-glycerate and 2-phospho-D-glycerate, activity of glyceraldehyde 3-phosphate dehydrogenase, phophoglycerate kinase and phosphoglycerate mutase, by gapA, pgk and gpmA/gpmM, respectively, in E. coli can be diminished.

[0133] However, if the alternative entry into the pentose phosphate pathway via fructose 6-phosphate phosphoketolase (Fpk) is utilized, then no glyceraldehyde 3-phosphate is needed and the appropriate 6-phosphofructokinase activity can be diminished or deleted (pfkA and/or pfkB genes in E. coli).

[0134] Connecting Pentose Phosphate Intermediates with MEG Production Routes

[0135] To connect the pentose phosphate pathway intermediate D-xylulose-5-phosphate with any one of the known MEG or glycolic acid production pathways, the D-xylulose-5-phosphate intermediate needs to be dephosphorylated by a pentose 5-phosphatase to generate D-xylulose (FIG. 2 and FIG. 5). Similarly, the D-ribulose-5-phosphate intermediate may be connected to any one of the known MEG or glycolic acid production pathways through dephosphorylation by a pentose 5-phosphatase to generate D-ribulose (FIG. 4 and FIG. 5).

[0136] In the case of a xylonate based pathway to MEG, the xylose isomerase function, such as XylA from E. coli, is further required to transform the generated D-xylulose into D-xylose (FIG. 3).

[0137] Alternatives and Variations in Connecting Pentose-Phosphate Pathway with MEG Production Routes

[0138] In the case of a D-ribulose-1-phosphate based pathway, the D-xylulose-5-phosphate intermediate can be connected to the pentose phosphate pathway as described via D-xylulose formation, following epimerization and phosphorylation (dte and fucK mediated) (FIG. 4). Alternatively, D-ribulose-5-phosphate can be used as an entry point and degraded to D-ribulose by utilizing a D-ribulose 5-phosphatase. This way, the necessary isomerization reaction is performed at the level of RPE rather than DTE (FIG. 4).

[0139] In some embodiments, pentose-5-phosphates can be transformed into pentose-1-phosphates using two arabitol dehydrogenase reactions in a row (FIG. 6). Here, the 2-keto position of D-xylulose-5-phosphate or D-ribulose-5-phosphate is reduced, then the 4-hydroxy position is oxidized to a keto group, turning the pentose-5-phosphates into pentose-1-phosphates (FIG. 7).

[0140] In further embodiments, pentose-5-phosphates can be transformed directly into pentose-1-phosphates through the action of a pentose phosphomutase (also known as phosphopentomutase or PPM). Similar to a phosphoglucomutase or phosphomannomutase, it transfers the phosphate residue from the last to the 1-position of the phospho sugar.

[0141] Hexose Utilization

[0142] The entry molecules of the pathway in the present disclosure are fructose-6-phosphate and glyceraldehyde-3-phosphate, both of which are obtained from normal glycolytic degradation of glucose or fructose in most organisms. If an organism has the ability to consume starch or sucrose or cellulose, for instance, via expression of a sucrose invertase, it will still generate glucose (and fructose), enabling it to utilize the methods of the present disclosure in the same way and to the same extent, yielding the same benefits.

[0143] Monoethylene Glycol (MEG)

[0144] Monoethylene glycol (MEG) is an important raw material for industrial applications. A primary use of MEG is in the manufacture of polyethylene terephthalate (PET) resins, films and fibers. In addition, MEG is important in the production of antifreezes, coolants, aircraft anti-icer and deicers and solvents. MEG is also known as ethane-1,2-diol.

[0145] Ethylene glycol is also used as a medium for convective heat transfer in, for example, automobiles and liquid cooled computers.

[0146] Because of its high boiling point and affinity for water, ethylene glycol is a useful desiccant. Ethylene glycol is widely used to inhibit the formation of natural gas clathrates (hydrates) in long multiphase pipelines that convey natural gas from remote gas fields to a gas processing facility. Ethylene glycol can be recovered from the natural gas and reused as an inhibitor after purification treatment that removes water and inorganic salts.

[0147] Minor uses of ethylene glycol include in the manufacture of capacitors, as a chemical intermediate in the manufacture of 1,4-dioxane, and as an additive to prevent corrosion in liquid cooling systems for personal computers. Ethylene glycol is also used in the manufacture of some vaccines; as a minor ingredient in shoe polish, inks and dyes; as a rot and fungal treatment for wood; and as a preservative for biological specimens.

[0148] Glycolic Acid

[0149] Glycolic acid is used in the textile industry as a dyeing and tanning agent, in food processing as a flavoring agent and as a preservative, and in the pharmaceutical industry as a skin care agent. It is also used in adhesives and plastics. Glycolic acid is often included into emulsion polymers, solvents and additives for ink and paint in order to improve flow properties and impart gloss. It is used in surface treatment products that increase the coefficient of friction on tile flooring.

[0150] Due to its excellent capability to penetrate skin, glycolic acid finds applications in skin care products to improve the skin's appearance and texture. It can be used as a chemical peel performed by a dermatologist in concentrations of 20 to 70% or at-home kits in lower concentrations between 10 and 20%. In addition to concentration, pH also plays a large part in determining the potency of glycolic acid in solution.

[0151] Glycolic acid can be synthesized in various ways. The predominant approach uses a catalyzed reaction of formaldehyde with synthesis gas (carbonylation of formaldehyde), for its low cost. It is also prepared by the reaction of chloroacetic acid with sodium hydroxide followed by re-acidification. Other methods, not noticeably in use, include hydrogenation of oxalic acid, and hydrolysis of the cyanohydrin derived from formaldehyde. Some of today's glycolic acids are formic acid-free. Glycolic acid can be isolated from natural sources, such as sugarcane, sugar beets, pineapple, cantaloupe and unripe grapes.

[0152] Glycolic acid is a useful intermediate for organic synthesis, in a range of reactions including: oxidation-reduction, esterification and long chain polymerization. It is used as a monomer in the preparation of polyglycolic acid and other biocompatible copolymers (e.g. PLGA). Commercially, important derivatives include the methyl (CAS #96-35-5) and ethyl (CAS #623-50-7) esters which are readily distillable. The butyl ester is a component of some varnishes, being desirable because it is nonvolatile and has good dissolving properties.

### Acetone

[0153] Acetone (also known as propanone) is an organic compound with the formula (CH3)₂CO. It is a colorless, volatile, flammable liquid, and is the simplest ketone.

[0154] Acetone is miscible with water and serves as an important solvent, typically for cleaning purposes in the laboratory. Over 6.7 million tonnes are produced worldwide, mainly for use as a solvent and production of methyl methacrylate and bisphenol A. It is a common building block in organic chemistry. Familiar household uses of acetone are as the active ingredient in nail polish remover and as paint thinner.

### Isopropanol

[0155] Isopropyl alcohol (IUPAC name 2-propanol), also called isopropanol, is a compound with the chemical formula C₃H₈O or C₃H₇OH or CH₃CHOHCH₃. It is a colorless, flammable chemical compound with a strong odor. It is the simplest example of a secondary alcohol, where the alcohol carbon atom is attached to two other carbon atoms sometimes shown as (CH3)₂CHOH. It is a structural isomer of propanol. It has a wide variety of industrial and household uses.

[0156] Propene, also known as propylene or methyl ethylene, is an unsaturated organic compound having the chemical formula C₃H₆. It has one double bond, and is the second simplest member of the alkene class of hydrocarbons.

[0157] Propene is produced from fossil fuels—petroleum, natural gas, and, to a much lesser extent, coal. Propene is a byproduct of oil refining and natural gas processing.

### Isobutene

[0158] Isobutene (also known as isobutylene or 2-methylpropene) is a hydrocarbon of industrial significance. It is a four-carbon branched alkene (olefin), one of the four isomers of butylene (butene). At standard temperature and pressure it is a colorless flammable gas.

[0159] Isobutene is used as an intermediate in the production of a variety of products. It is reacted with methanol and ethanol in the manufacture of the gasoline oxygenates methyl tert-butyl ether (MTBE) and ethyl tert-butyl ether (ETBE), respectively. Alkylation with butane produces isooctane, another fuel additive. Isobutene is also used in the production of methacrolein. Polymerization of isobutene produces butyl rubber (polyisobutene). Antioxidants such as butylated hydroxytoluene (BHT) and butylated hydroxyanisole (BHA) are produced by Friedel-Crafts alkylation of phenols using isobutene.

[0160] Polymer and chemical grade isobutene is typically obtained by dehydrating tertiary butyl alcohol or catalytic dehydrogenation of isobutane. Gasoline oxygenates MTBE and ETBE are generally produced by reacting methanol or ethanol with isobutene contained in butene streams from olefin steam crackers or refineries. Isobutene is not isolated before the reaction as separating the ethers from the remaining butenes is simpler.

### Serine Pathway Compounds

[0161] Compounds that may be co-produced with MEG (or glycolic acid) include serine pathway compounds, for example, serine, glycine, monoethanolamine (MEA) and ethylenediamine (EDA).

[0162] Serine is a non-essential amino acid that can be synthesized in the human body. Being highly water soluble, serine finds application as moisturizer in lotions of pharma and cosmetic industry. Further, there is a huge market for serine in the chemical industry because it can be converted into other chemicals such as plastics, detergents, dietary supplements and a variety of other products. In fact, serine has been mentioned as one of the 30 most promising biological substances to replace chemicals from the oil industry.

[0163] The α-decarboxylation of serine yields ethanolamine, an industrial product used as an intermediate in the herbicide, textile, metal, detergent, plastics, and personal care products industries with a production volume running into several hundreds of kilotonnes per annum (Scott, E. et al. (2007) Biomass in the manufacture of industrial products—the use of proteins and amino acids. Appl Microbiol Biotechnol. 75(4): 751-762).

[0164] Glycine, the simplest amino acid, is valuable for pharmaceutical and industrial applications. It is included as an additive in pet food and animal feed. For humans, glycine is sold as a sweetener/taste enhancer. Certain food supplements and protein drinks contain glycine. Certain drug formulations include glycine to improve gastric absorption of the drug. Glycine serves as a buffering agent in antacids, analgesics, antiperspirants, cosmetics, and toiletries. Many miscellaneous products use glycine or its derivatives, such as the production of rubber sponge products, fertilizers and metal complexants. Glycine is also valuable as an intermediate in the synthesis of a variety of chemical products. It is used in the manufacture of the herbicide glyphosate. Glycine can be converted to oxalic acid, which is used as a bleaching agent in the textile and pulp industries and wastewater treatment. Glycine is also extensively used in laboratory research, for example, in gel electrophoresis.

[0165] Ethylenediamine (EDA) (1,2-diaminoethane, C₂H₄(NH₂)₂) is used in large quantities for production of many industrial chemicals. It forms derivatives with carboxylic acids (including fatty acids), nitriles, alcohols (at elevated temperatures), alkylating agents, carbon disulfide, and aldehydes and ketones. Because of its bifunctional nature, having two amines, it readily forms heterocycles such as imidazolidines. A most prominent derivative of ethylenediamine is the chelating agent EDTA, which is derived from ethylenediamine via a Strecker synthesis involving cyanide and formaldehyde. Hydroxyethylethylenediamine is another commercially significant chelating agent. Numerous bio-active compounds and drugs contain the N—CH2-CH2-N linkage, including some antihistamines. Salts of ethylenebisdithiocarbamate are commercially significant fungicides under the brand names Maneb, Mancozeb, Zineb, and Metiram. Some imidazoline-containing fungicides are derived from ethylenediamine. Ethylenediamine is an ingredient in the common bronchodilator drug aminophylline, where it serves to solubilize the active ingredient theophylline. Ethylenediamine has also been used in dermatologic preparations. When used as a pharmaceutical excipient, after oral administration its bioavailability is about 0.34, due to a substantial first-pass effect. Less than 20% is eliminated by urinal excretion. Ethylenediamine, because it contains two amine groups, is a widely used precursor to various polymers. Condensates derived from formaldehyde are plasticizers. It is widely used in the production of polyurethane fibers. The PAMAM class of dendrimers are derived from ethylenediamine. The bleaching activator tetraacetylethylenediamine is generated from ethylenediamine. The derivative N,N-ethylenebis(stearamide) (EBS) is a commercially significant mold-release agent and a surfactant in gasoline and motor oil.

[0166] Ethylenediamine is also used as: a solvent to solubilize proteins such as albumins and casein; certain electroplating baths; corrosion inhibitor in paints and coolants; chemicals for color photography developing, binders, adhesives, fabric softeners, curing agents for epoxys, and dyes. Ethylenediamine dihydroiodide (EDDI) is added to animal feeds as a source of iodide.

### Xylitol

[0167] Xylitol is a chemical compound, a sugar alcohol, of considerable value as a sweetener. It is detected by the human palatte as approximately as sweet as sucrose, and it is non-toxic and non-cariogenic.

[0168] One method of producing xylitol utilizes xylan, a hemicellulose, which is extracted from hardwoods and corncobs. Xylans can be hydrolyzed into xylose, which is then catalytically hydrogenated into xylitol. Catalytic routes to xylitol are cost- and energy-intensive due to the use of extensive separation and purification steps involved in the process and have have low overall yield. Another method of producing xylitol includes utilizing fermentative and biocatalytic processes in bacteria, fungi, and/or yeast cells.

### Enzymes

[0169] Exemplary enzymes that may be used in the MEG (or glycolic acid), or optionally, MEG (or glycolic acid) and one or more co-product, biosynthesis pathways disclosed herein are listed in Table 1.

TABLE 1

| | | | | | | | | | |
|---|---|---|---|---|---|---|---|---|---|
| | | | | | | | SEQ | | SEQ |
| | | Required | | | Natural/ | Gene | ID | | ID |
| | | enzyme | Gene | Source | annotated | Identifier | NO | Uniprot | NO |
| Described Reaction | EC no. | activity | candidate | Organism | function | (nt) | (nt) | ID | (AA) |

Isomerases that may be used in D-xylonate pathways of the present disclosure

| | | | | | | | | | |
|---|---|---|---|---|---|---|---|---|---|
| D-xylose + | 1.1.1.307 | xylose | xyl1 | Scheffersomyces | D-xylose | GeneID: | 82, | P31867 | 84 |
| NAD(P)H <=> | | reductase | | stipitis | reductase | 4839234 | 83 | | |
| Xylitol + NAD(P)+ | | | | | | | | | |
| D-xylose + | 1.1.1.307 | xylose | GRE3 | Saccharomyces | aldose reductase | GeneID: | 85, | P38715 | 87 |
| NAD(P)H <=> | | reductase | | cerevisiae | | 856504 | 86 | | |
| Xylitol + NAD(P)+ | | | | | | | | | |
| Xylitol + NAD+ <=> | 1.1.1.9 | xylitol | xyl2 | Scheffersomyces | D-xylulose | GeneID: | 88, | P22144 | 90 |
| D-xylulose + NADH | | dehydrogenase | | stipitis | reductase | 4852013 | 89 | | |
| Xylitol + NAD+ <=> | 1.1.1.9 | xylitol | xdh1 | Trichoderma | Xylitol | ENA Nr.: | 91 | Q876R2 | 92 |
| D-xylulose + NADH | | dehydrogenase | | reesei | dehydrogenase | AF428150.1 | | | |
| D-xylopyranose <=> | 5.3.1.5 | xylose | xylA | Pyromyces sp. | xylose isomerase | ENA Nr.: | 93, | Q9P8C9 | 95 |
| D-xylulose | | isomerase | | | | CAB76571.1 | 94 | | |
| D-xylopyranose <=> | 5.3.1.5 | xylose | xylA | Escherichia | xylose isomerase | GeneID: | 143 | P00944 | 144 |
| D-xylulose | | isomerase | | coli | | 948141 | | | |

Glycolaldehyde reductases that may be used in all MEG pathways

| | | | | | | | | | |
|---|---|---|---|---|---|---|---|---|---|
| glycolaldehyde + | 1.1.1.- | glycolaldehyde | gldA | Escherichia | glycerol | GeneID: | 12 | P0A9S5 | 13 |
| NAD(P)H <=> | | reductase | | coli | dehydrogenase | 12933659 | | | |
| monoethylene glycol + | | | | | | | | | |
| NAD(P)+ | | | | | | | | | |
| glycolaldehyde + | 1.1.1.- | glycolaldehyde | GRE2 | Saccharomyces | methylglyoxal | GeneID: | 14 | Q12068 | 15 |
| NAD(P)H <=> | | reductase | | cerevisiae | reductase | 854014 | | | |
| monoethylene glycol + | | | | | | | | | |
| NAD(P)+ | | | | | | | | | |
| glycolaldehyde + | 1.1.1.- | glycolaldehyde | GRE3 | Saccharomyces | aldose reductase | GeneID: | 16 | P38715 | 17 |
| NAD(P)H <=> | | reductase | | cerevisiae | | 856504 | | | |
| monoethylene glycol + | | | | | | | | | |
| NAD(P)+ | | | | | | | | | |
| glycolaldehyde + | 1.1.1.- | glycolaldehyde | yqhD* | Escherichia | Alcohol | GeneID: | 18, | Modified | 20 |
| NAD(P)H <=> | | reductase | | coli | dehydrogenase | 947493 | 19 | version of | |
| monoethylene glycol + | | | | | | | | Q46856; | |
| NAD(P)+ | | | | | | | | G149E | |
| glycolaldehyde + | 1.1.1.- | glycolaldehyde | yqhD | Escherichia | Alcohol | GeneID: | 21, | Q46856 | 23 |
| NAD(P)H <=> | | reductase | | coli | dehydrogenase | 947493 | 22 | | |
| monoethylene glycol + | | | | | | | | | |
| NAD(P)+ | | | | | | | | | |
| glycolaldehyde + | 1.1.1.- | glycolaldehyde | ydjg | Escherichia | methylglyoxal | GeneID: | 24 | P77256 | 25 |
| NAD(P)H <=> | | reductase | | coli | reductase | 12930149 | | | |
| monoethylene glycol + | | | | | | | | | |
| NAD(P)+ | | | | | | | | | |
| glycolaldehyde + | 1.1.1.- | glycolaldehyde | fucO | Escherichia | lactaldehyde | GeneID: | 26, | P0A9S1 | 28 |
| NAD(P)H <=> | | reductase | | coli | reductase | 947273 | 27 | | |
| monoethylene glycol + | | | | | | | | | |
| NAD(P)+ | | | | | | | | | |
| glycolaldehyde + | 1.1.1.- | glycolaldehyde | yafB | Escherichia | methylglyoxal | 545778205 | 29 | P30863 | 30 |
| NAD(P)H <=> | | reductase | (dkgB) | coli | reductase | | | | |
| monoethylene glycol + | | | | | [multifunctional] | | | | |
| NAD(P)+ | | | | | | | | | |
| glycolaldehyde + | 1.1.1.- | glycolaldehyde | yqhE | Escherichia | 2,5-diketo-D- | GeneID: | 31 | Q46857 | 32 |
| NAD(P)H <=> | | reductase | (dkgA) | coli | gluconic acid | 947495 | | | |
| monoethylene glycol + | | | | | reductase A | | | | |
| NAD(P)+ | | | | | | | | | |

Enzymes that may be used in D-ribulose-1-phosphate pathway to MEG

| | | | | | | | | | |
|---|---|---|---|---|---|---|---|---|---|
| D-xylulose <=> D- | 5.1.3.- | D-ribulose-3- | DTE | Pseudomonas | D-tagatose 3- | ENA Nr.: | 1, | O50580 | 3 |
| ribulose | | epimerase | | cichorii | epimerase | BAA24429.1 | 2 | | |
| D-xylulose <=> D- | 5.1.3.- | D-ribulose-3- | C1KKR1 | Rhodobacter | D-tagatose 3- | ENA Nr.: | 4 | C1KKR1 | 5 |
| ribulose | | epimerase | | sphaeroides | epimerase | FJ851309.1 | | | |
| D-ribulose + ATP <=> | 2.7.1.- | D-ribulose-1- | fucK | Escherichia | L-fuculokinase | GeneID: | 6, | P11553 | 8 |
| D-ribulose-1- | | kinase | | coli | | 946022 | 7, | | |
| phosphate + ADP | | | | | | | 257 | | |
| D-ribulose-1-phos- | 4.1.2.- | D-ribulose-1- | fucA | Escherichia | L-fuculose | GeneID: | 9, | P0AB87 | 11 |
| phate <=> glycer- | | phosphate | | coli | phosphate | 947282 | 10 | | |
| aldehyde + | | aldolase | | | aldolase | | | | |
| dihydroxyacetone- | | | | | | | | | |
| phosphate | | | | | | | | | |

Enzymes that may be used in D-xylulose-1-phosphate pathway to MEG

| | | | | | | | | | |
|---|---|---|---|---|---|---|---|---|---|
| D-xylulose + ATP <=> | 2.7.1.- | D-xylulose 1- | khk-C | Homo sapiens | ketohexo- | GenBank: | 53, | P50053 | 55 |
| D-xylulose-1- | | kinase | (cDNA) | | kinase C | CR456801.1 | 54, | | |
| phosphate + ADP | | | | | | | 256 | | |
| D-xylulose-1- | 4.1.2.- | D-xylulose-1- | aldoB | Homo sapiens | Fructose- | CCDS6756.1 | 56, | P05062 | 58 |
| phosphate <=> glycer- | | phosphate | (cDNA) | | bisphosphate | | 57 | | |
| aldehyde+ dihydroxy- | | aldolase | | | aldolase B | | | | |
| acetonephosphate | | | | | | | | | |

Enzymes that may be used in D-xylonate pathway to MEG

| | | | | | | | | | |
|---|---|---|---|---|---|---|---|---|---|
| D-xylose + NAD+ <=> | 1.1.1.175 | xylose | xylB | Caulobacter | D-xylose 1- | GeneID: | 59, | B8H1Z0 | 61 |
| D-xylonolactone + | | dehydro- | | crescentus | dehydrogenase | 7329904 | 60 | | |
| NADH, or D-xylose + | | genase | | | | | | | |
| NAD+ <=> | | | | | | | | | |
| D-xylonate + NADH | | | | | | | | | |
| D-xylose + NADP+ <=> | 1.1.1.179 | xylose | xdh1, | Haloferax | D-xylose 1- | GeneID: | 62 | D4GP29 | 63 |
| D-xylonolactone + | | dehydro- | HVO_B00 | volcanii | dehydrogenase | 8919161 | | | |
| NADPH, or D-xylose + | | genase | 28 | | | | | | |
| NADP+ <=> D- | | | | | | | | | |
| xylonate + NADPH | | | | | | | | | |
| D-xylose + NADP+ <=> | 1.1.1.179 | xylose | xyd1 | Trichoderma | D-xylose 1- | ENA Nr.: | 64 | A0A024S | 65 |
| D-xylonolactone + | | dehydro- | | reesei | dehydrogenase | EF136590.1 | | MV2 | |
| NADPH, or D-xylose + | | genase | | | | | | | |
| NADP+ <=> D- | | | | | | | | | |
| xylonate + NADPH | | | | | | | | | |
| D-xylonolactone + | 3.1.1.68 | xylono- | xylC | Caulobacter | Xylonolactonase | GeneID: | 66 | A0A0H3C | 67 |
| H2O <=> D-xylonate | | lactonase | | crescentus | | 7329903 | | 6P8 | |
| D-xylonate <=> 2-keto- | 4.2.1.82 | xylonate | xylD | Caulobacter | xylonate | GeneID: | 68 | A0A0H3C | 69 |
| 3-deoxy-xylonate + H2O | | dehydratase | | crescentus | dehydratase | 7329902 | | 6H6 | |
| D-xylonate <=> 2-keto- | 4.2.1.82 | xylonate | yjhG | Escherichia | xylonate | GeneID: | 70, | P39358 | 72 |
| 3-deoxy-xylonate + H2O | | dehydratase | | coli | dehydratase | 946829 | 71 | | |
| D-xylonate <=> 2-keto- | 4.2.1.82 | xylonate | yagF | Escherichia | xylonate | GeneID: | 73, | P77596 | 75 |
| 3-deoxy-xylonate + H2O | | dehydratase | | coli | dehydratase | 944928 | 74 | | |
| 2-keto-3-deoxy- | 4.1.2.- | 2-keto-3- | yjhH | Escherichia | Uncharacterized | GeneID: | 76, | P39359 | 78 |
| xylonate <=> | | deoxy- | | coli | lyase | 948825 | 77 | | |
| glycolaldehyde + | | D-pentonate | | | | | | | |
| pyruvate | | aldolase | | | | | | | |
| 2-keto-3-deoxy- | 4.1.2.- | 2-keto-3- | yagE | Escherichia | Probable 2-keto- | GeneID: | 79, | P75682 | 81 |
| xylonate <=> | | deoxy- | | coli | 3-deoxy- | 944925 | 80 | | |
| glycolaldehyde + | | D-pentonate | | | galactonate | | | | |
| pyruvate | | aldolase | | | aldolase | | | | |

Enzymes that may be used in 2-propanol (IPA) pathway via acetone or in acetone pathway to isobutene

| | | | | | | | | | |
|---|---|---|---|---|---|---|---|---|---|
| 2 acetyl-Coa → | 2.3.1.9 | acetyl | thIA | Clostridium | acetyl coenzyme | 3309200 | 33, | P45359 | 35 |
| acetoacetyl-CoA + CoA | | coenzyme A | | acetobutylicum | A | | 34 | | |
| | | acetyl- | | | acetyltransferase | | | | |
| | | transferase | | | | | | | |
| 2 acetyl-Coa → | 2.3.1.9 | acetyl | atoB | Escherichia | acetyl coenzyme | GeneID: | 36 | P76461 | 37 |
| acetoacetyl-CoA + CoA | | coenzyme A | | coli | A | 946727 | | | |
| | | acetyl- | | | acetyltransferase | | | | |
| | | transferase | | | | | | | |
| 2 acetyl-Coa → | 2.3.1.9 | acetyl | ERG10 | Saccharomyces | acetyl coenzyme | 856079 | 38 | P41338 | 39 |
| acetoacetyl-CoA + CoA | | coenzyme A | | cerevisiae | A | | | | |
| | | acetyl- | | | acetyltransferase | | | | |
| | | transferase | | | | | | | |
| acetoacetyl-CoA + | 2.8.3.8 | Acetyl- | atoA | Escherichia | Acetyl-CoA: | 48994873 | 41, | P76459 | 43 |
| acetate → acetoacetate + | | CoA:aceto- | | coli | acetoacetate- | | 42 | | |
| acetyl-CoA | | acetate-CoA | | | CoA transferase | | | | |
| | | transferase | | | subunit | | | | |
| | | subunit | | | | | | | |
| acetoacetyl-CoA + | 2.8.3.8 | Acetyl- | atoD | Escherichia | Acetyl-CoA: | 48994873 | 44, | P76458 | 46 |
| acetate → acetoacetate + | | CoA:aceto- | | coli | acetoacetate- | | 45 | | |
| acetyl-CoA | | acetate-CoA | | | CoA transferase | | | | |
| | | transferase | | | subunit | | | | |
| | | subunit | | | | | | | |
| acetoacetate → | 4.1.1.4 | acetoacetate | adc | Clostridium | acetoacetate | 6466901 | 47, | P23670 | 49 |
| acetone + CO2 | | decarboxylase | | acetobutylicum | decarboxylase | | 48 | | |
| acetoacetate → | 4.1.1.4 | acetoacetate | adc | Clostridium | acetoacetate | 149901357 | 50, | A6M020 | 52 |
| acetone + CO2 | | decarboxylase | | beijerinckii | decarboxylase | | 51 | | |
| acetone + acetyl-CoA + | 2.3.3.- | 3-hydroxy- | Hmgcs1 | Mus musculus | hydroxymethyl- | CCDS56901.1; | 104 | Q3UWQ9 | 105 |
| H2O ↔ 3-hydroxy- | | isovalerate | | | glutaryl-CoA | GeneID: | | | |
| isovalerate | | synthase | | | synthase | 208715 | | | |
| acetone + acetyl-CoA + | 2.3.3.- | 3-hydroxy- | ERG13 | Saccharomyces | hydroxymethyl- | GeneID: | 106 | P54839 | 107 |
| H2O ↔ 3-hydroxy- | | isovalerate | | cerevisiae | glutaryl-CoA | 854913 | | | |
| isovalerate | | synthase | | | synthase | | | | |
| acetone + acetyl-CoA + | 2.3.3.- | 3-hydroxy- | PksG | Lactobacillus | hydroxymethyl- | GeneID: | 108 | AEL95_01 | 109 |
| H2O ↔ 3-hydroxy- | | isovalerate | | crispatus ST1 | glutaryl-CoA | 9107446 | | 455 | |
| isovalerate | | synthase | | | synthase/ | | | | |
| | | | | | polyketide | | | | |
| | | | | | intermediate | | | | |
| | | | | | transferase | | | | |
| acetone + acetyl-CoA + | 2.3.3.- | 3-hydroxy- | Pnap_0477 | Polaromonas | hydroxymethyl- | ABM35799.1 | 110 | A1VJH1 | 111 |
| H2O ↔ 3-hydroxy- | | isovalerate | | naph- | glutaryl-CoA | | | | |
| isovalerate | | synthase | | thalenivorans | lyase | | | | |
| 3-hydroxy-isovalerate + | 2.7.1.- | hydroxy- | TA1305 | Thermoplasma | mevalonate- | GeneID: | 112 | Q9HIN1 | 113 |
| ATP ↔ ADP + | | isovalerate | | acidophilum | diphosphate | 1456782 | | | |
| H(+ ) + 3- | | kinase | | | decarboxylase/ | | | | |
| phosphonoxyisovalerate | | | | | mevalonate- | | | | |
| | | | | | monophosphate | | | | |
| | | | | | decarboxylase | | | | |
| 3-hydroxy-isovalerate + | 2.7.1.- | hydroxy- | TA1305* | Thermoplasma | mevalonate- | GeneID: | 114 | Modified | 115 |
| ATP ↔ ADP + | | isovalerate | (L200E) | acidophilum | diphosphate | 1456782 | | version of | |
| H(+ ) + 3- | | kinase | | | decarboxylase/ | | | Q9HIN1; | |
| phosphonoxyisovalerate | | | | | mevalonate- | | | L200E | |
| | | | | | monophosphate | | | | |
| | | | | | decarboxylase | | | | |
| 3-hydroxy-isovalerate + | 2.7.1.- | hydroxy- | PTO1356 | Picrophilus | mevalonate- | GeneID: | 116 | Q6KZB1 | 117 |
| ATP ↔ ADP + | | isovalerate | | torridus | diphosphate | 2845209 | | | |
| H(+ ) + 3- | | kinase | | | decarboxylase | | | | |
| phosphonoxyisovalerate | | | | | | | | | |
| 3- | 4.1.1.- | 3- | smi_1746 | Streptococcus | mevalonate- | Genbank: | 118 | D3HAT7 | 119 |
| phosphonoxy- | | phosphonoxy- | | mitis | diphosphate | CBJ22986.1 | | | |
| isovalerate → | | isovalerate | | | decarboxylase | | | | |
| CO(2) + isobutene | | decarboxylase | | | | | | | |
| 3- | 4.1.1.- | 3- | mvaD | Streptococcus | mevalonate- | GeneID: | 120 | A8AUU9 | 121 |
| phosphonoxy- | | phosphonoxy- | | gordonii | diphosphate | 25051665 | | | |
| isovalerate → | | isovalerate | | | decarboxylase | | | | |
| CO(2) + isobutene | | decarboxylase | | | | | | | |
| 3- | 4.1.1.- | hydroxy- | TA1305 | Thermoplasma | mevalonate- | GeneID: | 112 | Q9HIN1 | 113 |
| phosphonoxy- | | isovalerate | | acidophilum | diphosphate | 1456782 | | | |
| isovalerate → | | decarboxylase | | | decarboxylase | | | | |
| 3-hydroxy-isovalerate → | 4.1.1.- | hydroxy- | PTO1356 | Picrophilus | mevalonate- | GeneID: | 116 | Q6KZB1 | 117 |
| CO(2) + isobutene | | isovalerate | | torridus | diphosphate | 2845209 | | | |
| | | decarboxylase | | | decarboxylase | | | | |
| 3-hydroxy-isovalerate → | 4.1.1.- | hydroxy- | mvaD | Streptococcus | mevalonate- | GeneID: | 120 | A8AUU9 | 121 |
| CO(2) + isobutene | | isovalerate | | gordonii | diphosphate | 25051665 | | | |
| | | decarboxylase | | | decarboxylase | | | | |

Hydrolases that may be used in improved acetone pathway to isobutene

| | | | | | | | | | |
|---|---|---|---|---|---|---|---|---|---|
| Acetoacetyl-CoA + | 3.1.2.11 | acetate: | ctfA | Clostridium | butyrate- | NCBI- | 96 | P33752 | 97 |
| H(2)O <=> CoA + | | acetoace | | acetobutylicum | acetoacetate | GeneID: | | | |
| acetoacetate | | tyl-CoA | | | CoA-transferase, | 1116168 | | | |
| | | hydrolase | | | complex A | | | | |
| Acetoacetyl-CoA + | 3.1.2.11 | acetate: | ctfB | Clostridium | butyrate- | NCBI- | 98 | P23673 | 99 |
| H(2)O <=> CoA + | | acetoace | | acetobutylicum | acetoacetate | GeneID: | | | |
| acetoacetate | | tyl-CoA | | | CoA-transferase, | 1116169 | | | |
| | | hydrolase | | | subunit B | | | | |
| Acetoacetyl-CoA + | 3.1.2.11 | acetate: | atoA | Escherichia | Acetyl- | GeneID: | 100 | P76459 | 101 |
| H(2)O <=> CoA + | | acetoace | | coli | CoA: | 946719 | | | |
| acetoacetate | | tyl-CoA | | (strain K12) | acetoacetate- | | | | |
| | | hydrolase | | | CoA transferase | | | | |
| | | | | | subunit | | | | |
| Acetoacetyl-CoA + | 3.1.2.11 | acetate: | atoD | Escherichia | Acetyl- | GeneID: | 102 | P76458 | 103 |
| H(2)O <=> CoA + | | acetoace | | coli | CoA: | 947525 | | | |
| acetoacetate | | tyl-CoA | | (strain K12) | acetoacetate- | | | | |
| | | hydrolase | | | CoA transferase | | | | |
| | | | | | subunit | | | | |

Enzymes that may be used in HMG-CoA pathway to isobutene

| | | | | | | | | | |
|---|---|---|---|---|---|---|---|---|---|
| acetyl-CoA + H2O + | 2.3.3.10 | HMG-CoA | hmgS | Saccharomyces | HMG-CoA | GeneID: | 122 | P54839 | 123 |
| acetoacetyl-CoA <=> | | synthase | | cerevisiae | synthase | 854913 | | | |
| (S)-3-hydroxy-3- | | | | | | | | | |
| methylglutaryl-CoA + | | | | | | | | | |
| CoA | | | | | | | | | |
| (S)-3-hydroxy-3- | 4.2.1.18 | methyl- | liuC | Pseudomonas | methyl- | GeneID: | 124 | Q88FM3 | 125 |
| methylglutaryl-CoA <=> | | glutaconyl- | | putida | glutaconyl- | 1041856 | | | |
| trans-3- | | CoA hydratase | | | CoA hydratase | | | | |
| methylglutaconyl-CoA | | | | | | | | | |
| + H(2)O | | | | | | | | | |
| ADP + phosphate + 3- | 6.4.1.4. | methyl- | liuB | Pseudomonas | methylcrotonyl- | GeneID: | 126 | 091297 | 127 |
| methylglutaconyl- | | crotonyl-CoA | | aeruginosa | CoA carboxylase | 878244 | | | |
| CoA <=>ATP + 3- | | carboxylase | | | subunit beta | | | | |
| methylcrotonoyl-CoA + | | | | | | | | | |
| HCO(3)(-) | | | | | | | | | |
| ADP + phosphate + 3- | 6.4.1.4. | methyl- | liuD | Pseudomonas | methylcrotonyl- | GeneID: | 128 | 091299 | 129 |
| methylglutaconyl- | | crotonyl-CoA | | aeruginosa | CoA carboxylase | 879012 | | | |
| CoA <=>ATP + 3- | | carboxylase | | | subunit alpha | | | | |
| methylcrotonoyl-CoA + | | | | | | | | | |
| HCO(3)(-) | | | | | | | | | |
| trans-2(or 3)-enoyl- | 4.2.1.17 | methyl- | fadA | E. coli | fatty acid | GeneID: | 130 | P21151 | 131 |
| CoA + H(2)O <=> (3S)- | | crotonyl-CoA | | | oxidation | 948324 | | | |
| 3-hydroxyacyl-CoA | | hydratase | | | complex, 3- | | | | |
| | | | | | ketoacyl-CoA | | | | |
| | | | | | thiolase | | | | |
| trans-2(or 3)-enoyl- | 4.2.1.17 | methyl- | fadB | E. coli | fatty acid | GeneID: | 132 | P21177 | 133 |
| CoA + H(2)O <=> (3S)- | | crotonyl-CoA | | | oxidation | 948336 | | | |
| 3-hydroxyacyl-CoA | | hydratase | | | complex, enoyl- | | | | |
| | | | | | CoA hydratase | | | | |
| 3-hydroxy-isovaleryl- | 3.1.2.- | 3-hydroxy- | tesB | E. coli | acyl-CoA | GeneID: | 134 | POAGG2 | 135 |
| CoA + H2O <=> 3- | | isovaleryl-CoA | | | thioesterase | 945074 | | | |
| hydroxy-isovalerate + | | thioesterase | | | | | | | |
| CoA | | | | | | | | | |

Enzymes that may be used in 2-propanol (IPA) pathway via acetone

| | | | | | | | | | |
|---|---|---|---|---|---|---|---|---|---|
| acetone + NAD(P)H → | 1.1.1.2 | secondary | adh | Clostridium | secondary | 60592972 | 136, | P25984 | 138 |
| 2-propanol + NAD(P)+ | | alcohol | | beijerinckii | alcohol | | 137 | | |
| | | dehydrogenase | | | dehydrogenase | | | | |
| acetone + NAD(P)H → | 1.1.1.2 | secondary | adh | Clostridium | alcohol | 308066805 | 139 | C6PZV5 | 140 |
| 2-propanol + NAD(P)+ | | alcohol | | carboxidivorans | dehydrogenase | | | | |
| | | dehydrogenase | | | | | | | |
| ADH + NADP+ ↔ | 1.6.1.1. | Soluble pyri- | udhA | Escherichia | Soluble pyridine | GeneID: | 141 | P27306 | 142 |
| NAD+ + NADPH | | dine nucleotide | | coli | nucleotide trans- | 948461 | | | |
| | | trans- | | | hydrogenase | | | | |
| | | hydrogenase | | | | | | | |

Enzymes that may be used in hexose to pentose-5-phosphate pathways

| | | | | | | | | | |
|---|---|---|---|---|---|---|---|---|---|
| ATP + D-xylulose = | 2.7.1.17 | Xylulose | xylB | E. coli | Xylulose kinase | GeneID: | 145 | P09099 | 146 |
| ADP + D-xylulose 5- | | 5-kinase | | | | 948133 | | | |
| phosphate | | | | | | | | | |
| D-erythrose 4- | 2.2.1.1 | Transketolase | tktA | E. coli | Transketolase | GeneID: | 147 | P27302 | 148 |
| phosphate + D-xylulose | | | | | | 947420 | | | |
| 5-phosphate ↔ β-D- | | | | | | | | | |
| fructofuranose 6- | | | | | | | | | |
| phosphate + D- | | | | | | | | | |
| glyceraldehyde 3- | | | | | | | | | |
| phosphate | | | | | | | | | |
| D-sedoheptulose 7- | 2.2.1.1 | Transketolase | tktA | E. coli | Transketolase | GeneID: | 147 | P27302 | 148 |
| phosphate + D- | | | | | | 947420 | | | |
| glyceraldehyde 3- | | | | | | | | | |
| phosphate ↔ D-ribose | | | | | | | | | |
| 5-phosphate + D- | | | | | | | | | |
| xylulose 5-phosphate | | | | | | | | | |
| D-erythrose 4- | 2.2.1.1 | Transketolase | tktB | E. coli | Transketolase | GeneID: | 149 | P33570 | 150 |
| phosphate + D-xylulose | | | | | | 945865 | | | |
| 5-phosphate ↔ β-D- | | | | | | | | | |
| fructofuranose 6- | | | | | | | | | |
| phosphate + D- | | | | | | | | | |
| glyceraldehyde 3- | | | | | | | | | |
| phosphate | | | | | | | | | |
| D-sedoheptulose7- | 2.2.1.1 | Transketolase | tktB | E. coli | Transketolase | GeneID: | 149 | P33570 | 150 |
| phosphate + D- | | | | | | 945865 | | | |
| glyceraldehyde 3- | | | | | | | | | |
| phosphate ↔ D-ribose | | | | | | | | | |
| 5-phosphate + D- | | | | | | | | | |
| xylulose 5-phosphate | | | | | | | | | |
| D-sedoheptulose 7- | 2.2.1.2 | Transaldolase | talA | E. coli | Transaldolase | GeneID: | 151 | P0A867 | 152 |
| phosphate + D- | | | | | | 947006 | | | |
| glyceraldehyde 3- | | | | | | | | | |
| phosphate ↔ β-D- | | | | | | | | | |
| fructofuranose 6- | | | | | | | | | |
| phosphate + D- | | | | | | | | | |
| erythrose 4-phosphate | | | | | | | | | |
| D-sedoheptulose 7- | 2.2.1.2 | Transaldolase | talB | E. coli | Transaldolase | GeneID: | 153 | P0A870 | 154 |
| phosphate + D- | | | | | | 944748 | | | |
| glyceraldehyde 3- | | | | | | | | | |
| phosphate ↔ β-D- | | | | | | | | | |
| fructofuranose 6- | | | | | | | | | |
| phosphate + D- | | | | | | | | | |
| erythrose 4-phosphate | | | | | | | | | |
| D-ribose 5-phosphate ↔ | 5.3.1.6 | Ribose-5- | rpiA | E. coli | Ribose-5- | GeneID: | 155 | P0A7Z0 | 156 |
| D-ribulose 5- | | phosphate | | | phosphate | 947407 | | | |
| phosphate | | isomerase | | | isomerase | | | | |
| D-ribose 5-phosphate ↔ | 5.3.1.6 | Ribose-5- | rpiB | E. coli | Ribose-5- | GeneID: | 254 | P37351 | 253 |
| D-ribulose 5- | | phosphate | | | phosphate | 948602 | | | |
| phosphate | | isomerase | | | isomerase | | | | |
| D-ribulose 5-phos- | 5.1.3.1 | Ribulose-5- | rpe | E. coli | Ribulose-5- | GeneID: | 157 | P0AG07 | 158 |
| phate ↔ D-xylulose | | phosphate 3- | | | phosphate 3- | 947896 | | | |
| 5-phosphate | | epimerase | | | epimerase | | | | |
| D-pentose 5-phosphate + | 3.1.3.1 | D-pentose-5- | phoA | E. coli | alkaline | GeneID: | 159 | P00634 | 160 |
| H2O → D-pentose + | | phosphatase | | | phosphatase | 945041 | | | |
| phosphate | | (PP) | | | | | | | |
| D-ribose 5-phosphate + | 3.1.3.23 | D-ribose-5- | SGPP | Arabidopsis | Haloacid | GeneID: | 161 | Q9ZVJ5 | 162 |
| H2O → D-ribose + | | phosphatase | | thaliana | dehalogenase- | 818456 | | | |
| phosphate | | (PP) | | | like hydrolase | | | | |
| D-xylulose 5-phos- | 3.1.3.23 | D-xylulose-5- | araL | Bacillus | sugar | GeneID: | 163 | P94526 | 164 |
| phate + H2O → D- | | phosphatase | | subtilis | phosphatase | 937431 | | | |
| xylulose + phosphate | | (PP) | | | | | | | |
| D-ribose 5-phosphate + | 3.1.3.23 | D-ribose-5- | PFLU_2693 | Pseudomonas | haloacid | GeneID: | 165 | C3K9U8 | 166 |
| H2O → D-ribose + | | phosphatase | | fluorescens | dehalogenase- | 7821858 | | | |
| phosphate | | (PP) | | | likee nzyme | | | | |
| D-pentose 5-phosphate + | 3.1.3.23 | D-pentose-5- | yfbT | E. coli | sugar | GeneID: | 167 | P77625 | 168 |
| H2O → D-pentose + | | phosphatase | | | phosphatase | 946777 | | | |
| phosphate | | (PP) | | | | | | | |
| D-ribose 5-phosphate + | 3.1.3.23 | D-ribose-5- | ybiV | E. coli | sugar | GeneID: | 169 | P75792 | 170 |
| H2O → D-ribose + | | phosphatase | | | phosphatase | 945432 | | | |
| phosphate | | (PP) | | | | | | | |
| D-pentose 5-phos- | 3.1.3.23 | D-pentose-5- | yidA | E. coli | sugar | GeneID: | 171 | P0A8Y5 | 172 |
| phate + H2O → D- | | phosphatase | | | phosphatase | 948204 | | | |
| pentose + phosphate | | (PP) | | | | | | | |
| D-ribulose 5-phos- | 3.1.3.23 | D-ribulose-5- | PF10_0325 | Plasmodium | Haloacid | GeneID: | 173 | Q8IJ74 | 174 |
| phate + H2O → D- | | phosphatase | | falciparum | dehalogenase- | 810482 | | | |
| ribulose + phosphate | | (PP) | | | like hydrolase | | | | |
| D-arabitol 1-phos- | 1.1.1.301 | D-arabitol 1- | APDH | Enterococcus | D-arabitol- | GenBank: | 175 | Q8KQL2 | 176 |
| phate + NAD+ ↔ | | phosphate 4- | | avium | phosphate | AY078980.1 | | | |
| D-xylulose 5-phos- | | dehydrogenase | | | dehydrogenase | | | | |
| phate + NADH + | | (APD) | | | | | | | |
| H+ | | | | | | | | | |
| D-arabitol 5-phos- | 1.1.1.- | D-arabitol 5- | APDH | Enterococcus | D-arabitol- | GenBank: | 175 | Q8KQL2 | 176 |
| phate + NAD+ ↔ | | phosphate 2- | | avium | phosphate | AY078980.1 | | | |
| D-ribulose 5-phos- | | dehydrogenase | | | dehydrogenase | | | | |
| phate + NADH + | | (APD) | | | | | | | |
| H+ | | | | | | | | | |
| D-arabitol 1-phos- | 1.1.1.- | D-arabitol 1- | ARD1 | Candida | D-arabitol 2- | EMBL | 177 | P43066 | 178 |
| phate + NAD+ ↔ | | phosphate 2- | | albicans | dehydrogenase | Translation: | | | |
| D-ribulose 1-phos- | | dehydrogenase | | (strain | | AAC37430.1 | | | |
| phate + NADH + | | (APD) | | WO-1) | | | | | |
| H+ | | | | | | | | | |
| D-arabitol 1-phos- | 1.1.1.- | D-arabitol 1- | ARD1 | Candida | D-arabitol 2- | EMBL | 179 | P50166 | 180 |
| phate + NAD+ ↔ | | phosphate 2- | | tropicalis | dehydrogenase | Translation: | | | |
| D-ribulose 1-phos- | | dehydrogenase | | | | AAA66355.1 | | | |
| phate+ NADH + | | (APD) | | | | | | | |
| H+ | | | | | | | | | |
| D-arabitol 1-phos- | 1.1.1.- | D-arabitol 1- | ARDH | Scheffersomyces | D-arabitol 2- | EMBL | 181 | P50167 | 182 |
| phate + NAD+ ↔ D- | | phosphate 2- | | stipitis (strain | dehydrogenase | Translation: | | | |
| ribulose 1-phos- | | dehydrogenase | | ATCC 58785) | | CAA86939.1 | | | |
| phate + NADH + | | (APD) | | | | | | | |
| H+ | | | | | | | | | |
| D-arabitol 5-phosphate | 1.1.1.- | D-arabitol 5- | mtID | Pseudomonas | D-arabitol 4- | GenBank: | 183 | GenBank: | 184 |
| + NAD+ ↔ D-xylulose | | phosphate 4- | | fluorescens | dehydrogenase | AF007800.1 | | AAC04472.1 | |
| 1-phosphate + NADH | | dehydrogenase | | | | | | | |
| + H+ | | (APD) | | | | | | | |
| D-arabitol 5-phosphate | 1.1.1.- | D-arabitol 5- | dalD | Klebsiella | D-arabitol 4- | NCBI: | 185 | O52720 | 186 |
| + NAD+ ↔ D-xylulose | | phosphate 4- | | pneumoniae | dehydrogenase | NZ_FLCX010 | | | |
| 1-phosphate + NADH | | dehydrogenase | | | | 00003.1 | | | |
| + H+ | | (APD) | | | | | | | |
| D-arabitol 5-phosphate | 1.1.1.- | D-arabitol 5- | dalD | Ralstonia | D-arabitol 4- | GeneID: | 187 | P58708 | 188 |
| + NAD+ ↔ D-xylulose | | phosphate 4- | | solanacearum | dehydrogenase | 1220971 | | | |
| 1-phosphate + NADH | | dehydrogenase | | (strain | | | | | |
| + H+ | | (APD) | | GMI1000) | | | | | |
| D-arabitol 5-phosphate | 1.1.1.- | D-arabitol 5- | egsA | Bacillus | Glycerol-1- | GeneID: | 189 | P94527 | 190 |
| + NAD+ ↔ D-xylulose | | phosphate 4- | (araM) | subtilis | phosphate | 938011 | | | |
| 1-phosphate + NADH | | dehydrogenase | | | dehydrogenase | | | | |
| + H+ | | (APD) | | | | | | | |
| D-arabitol 1-phosphate + | 1.1.1.- | D-arabitol 1- | egsA | Bacillus | Glycerol-1- | GeneID: | 189 | P94527 | 190 |
| NAD+ ↔ D-ribulose | | phosphate 2- | (araM) | subtilis | phosphate | 938011 | | | |
| 1-phosphate + NADH | | dehydrogenase | | | dehydrogenase | | | | |
| + H+ | | (APD) | | | | | | | |
| D-arabitol 5-phosphate + | 1.1.1.- | D-arabitol 5- | egsA | Aeropyrum | Glycerol-1- | EMBL: | 191 | Q9YER2 | 192 |
| NAD+ ↔ D-xylulose | | phosphate 4- | | pernix (strain | phosphate | BAA79484.3 | | | |
| 1-phosphate + NADH + | | dehydrogenase | | ATCC | dehydrogenase | | | | |
| H+ | | (APD) | | 700893) | | | | | |
| D-arabitol 1-phosphate + | 1.1.1.- | D-arabitol 1- | egsA | Aeropyrum | Glycerol-1- | EMBL: | 191 | Q9YER2 | 192 |
| NAD+ ↔ D-ribulose | | phosphate 2- | | pernix (strain | phosphate | BAA79484.3 | | | |
| 1-phosphate + NADH + | | dehydrogenase | | ATCC | dehydrogenase | | | | |
| H+ | | (APD) | | 700893) | | | | | |
| D-arabitol 5-phosphate + | 1.1.1.- | D-arabitol 5- | gpsA | E. coli | glycerol-3- | GeneID: | 193 | P0A6S7 | 194 |
| NAD+ ↔ D-xylulose | | phosphate 4- | | | phosphate | 948125 | | | |
| 1-phosphate + NADH + | | dehydrogenase | | | dehydrogenase | | | | |
| H+ | | (APD) | | | | | | | |
| D-arabitol 1-phosphate + | 1.1.1.- | D-arabitol 1- | gpsA | E. coli | glycerol-3- | GeneID: | 193 | P0A6S7 | 194 |
| NAD+ ↔ D-ribulose | | phosphate 2- | | | phosphate | 948125 | | | |
| 1-phosphate + NADH + | | dehydrogenase | | | dehydrogenase | | | | |
| H+ | | (APD) | | | | | | | |
| D-arabitol 5-phosphate + | 1.1.1.- | D-arabitol 5- | GPD1 | Saccharomyces | glycerol-3- | GeneID: | 195 | Q00055 | 196 |
| NAD+ ↔ D-xylulose | | phosphate 4- | | cerevisiae | phosphate | 851539 | | | |
| 1-phosphate + NADH + | | dehydrogenase | | | dehydrogenase | | | | |
| H+ | | (APD) | | | | | | | |
| D-arabitol 1-phosphate + | 1.1.1.- | D-arabitol 1- | GPD1 | Saccharomyces | glycerol-3- | GeneID: | 195 | Q00055 | 196 |
| NAD+ ↔ D-ribulose | | phosphate 2- | | cerevisiae | phosphate | 851539 | | | |
| 1-phosphate + NADH + | | dehydrogenase | | | dehydrogenase | | | | |
| H+ | | (APD) | | | | | | | |
| D-xylu lose 5-phos- | 5.4.2.- | phospho- | deoB | E. coli | phospho- | GeneID: | 197 | P0A6K6 | 198 |
| phate ↔ D-xylulose 1- | | pentomutase | | | pentomutase | 948910 | | | |
| phosphate | | (PPM) | | | | | | | |
| D-ribulose 5-phos- | 5.4.2.- | phospho- | deoB | E. coli | phospho- | GeneID: | 197 | P0A6K6 | 198 |
| phate ↔ D-ribulose 1- | | pentomutase | | | pentomutase | 948910 | | | |
| phosphate | | (PPM) | | | | | | | |
| D-xylulose 5-phos- | 5.4.2.- | phospho- | pgm | E. coli | alpha- | GeneID: | 199 | P36938 | 200 |
| phate ↔ D-xylulose 1- | | pentomutase | | | phospho- | 945271 | | | |
| phosphate | | (PPM) | | | glucomutase | | | | |
| D-ribulose 5-phos- | 5.4.2.- | phospho- | pgm | E. coli | alpha- | GeneID: | 199 | P36938 | 200 |
| phate ↔ D-ribulose 1- | | pentomutase | | | phospho- | 945271 | | | |
| phosphate | | (PPM) | | | glucomutase | | | | |
| D-xylulose 5-phos- | 5.4.2.- | phospho- | pgcA | Bacillus subtilis | alpha- | GeneID: | 201 | P18159 | 202 |
| phate ↔ D-xylulose | | pentomutase | | | phosphogluco- | 936247 | | | |
| 1-phosphate | | (PPM) | | | mutase | | | | |
| D-ribulose 5-phos- | 5.4.2.- | phospho- | pgcA | Bacillus subtilis | alpha- | GeneID: | 201 | P18159 | 202 |
| phate ↔ D-ribulose | | pentomutase | | | phosphogluco- | 936247 | | | |
| 1-phosphate | | (PPM) | | | mutase | | | | |
| D-xylulose 5-phos- | 5.4.2.- | phospho- | pgmB | Lactococcus | beta- | GeneID: | 203 | P71447 | 204 |
| phate ↔ D-xylulose | | pentomutase | | lactis | phospho- | 1114041 | | | |
| 1-phosphate | | (PPM) | | | glucomutas | | | | |
| D-ribulose 5-phos- | 5.4.2.- | phospho- | pgmB | Lactococcus | beta- | GeneID: | 203 | P71447 | 204 |
| phate ↔ D-ribulose | | pentomutase | | lactis | phospho- | 1114041 | | | |
| 1-phosphate | | (PPM) | | | glucomutas | | | | |
| D-xylulose 5-phos- | 5.4.2.- | phospho- | ycjU | E. coli | beta- | GeneID: | 205 | P77366 | 206 |
| phate ↔ D-xylulose | | pentomutase | | | phospho- | 945891 | | | |
| 1-phosphate | | (PPM) | | | glucomutas | | | | |
| D-ribulose 5-phos- | 5.4.2.- | phospho- | ycjU | E. coli | beta- | GeneID: | 205 | P77366 | 206 |
| phate ↔ D-ribulose | | pentomutase | | | phospho- | 945891 | | | |
| 1-phosphate | | (PPM) | | | glucomutas | | | | |
| D-ribulose 5-phos- | 5.4.2.7 | phospho- | PGM3 | Saccharomyces | phosphoribo- | GenBank: | 255 | Q03262 | 258 |
| phate ↔ D-ribulose | | pentomutase | (PRM15) | cerevisiae | mutase | NM_001182 | | | |
| 1-phosphate | | (PPM) | | | | 785.1 | | | |
| | | | | | | Gene ID: | | | |
| | | | | | | 855321 | | | |
| D-xylulose 5-phos- | 5.4.2.- | phospho- | algC | Pseudomonas | phospho- | GenBank: | 207 | P26276 | 208 |
| phate ↔ D-xylulose | | pentomutase | | aeruginosa | mannose | M60873.1 | | | |
| 1-phosphate | | (PPM) | | | mutase | | | | |
| D-ribulose 5-phos- | 5.4.2.- | phospho- | algC | Pseudomonas | phospho- | GenBank: | 207 | P26276 | 208 |
| phate ↔ D-ribulose | | pentomutase | | aeruginosa | mannose | M60873.1 | | | |
| 1-phosphate | | (PPM) | | | mutase | | | | |
| D-xylulose 5-phos- | 5.4.2.- | phospho- | cpsG | E. coli | phospho- | GeneID: | 209 | P24175 | 210 |
| phate ↔ D-xylulose | | pentomutase | | | mannose | 946574 | | | |
| 1-phosphate | | (PPM) | | | mutase | | | | |
| D-ribulose 5-phos- | 5.4.2.- | phospho- | cpsG | E. coli | phospho- | GeneID: | 209 | P24175 | 210 |
| phate ↔ D-ribulose | | pentomutase | | | mannose | 946574 | | | |
| 1-phosphate | | (PPM) | | | mutase | | | | |
| D-fructose 6-phos- | 4.1.2.22 | fructose 6- | BDP_1006 | Bifidobacterium | fructose 6- | EMBL: | 211 | D2QA13 | 212 |
| phate + phos- | | phosphate | | dentium | phosphate | ADB09649.1 | | | |
| phate ↔ acetylphos- | | phospho- | | | phospho- | | | | |
| phate + D-erythrose | | ketolase | | | ketolase | | | | |
| 4-phosphate + H2O | | (Fpk) | | | | | | | |
| D-fructose 6-phos- | 4.1.2.22 | fructose 6- | xfp | Bifidobacterium | Xylulose-5- | GeneID: | 213 | Q9AEM9 | 214 |
| phate + phosphate ↔ | | phosphate | | lactis | phosphate/ | 29696432 | | | |
| acetyl phosphate + D- | | phospho- | | | fructose- | | | | |
| erythrose 4-phos- | | ketolase | | | 6-phosphate | | | | |
| phate + H2O | | (Fpk) | | | phosphoketolase | | | | |
| D-fructose 6-phos- | 4.1.2.22 | fructose 6- | xpkA | Lactobacillus | phosphoketolase | EMBL: | 215 | Q6UPD8 | 216 |
| phate + phosphate ↔ | | phosphate | | paraplantarum | | AAQ64626.2 | | | |
| acetyl phosphate + D- | | phospho- | | | | | | | |
| erythrose 4-phos- | | ketolase | | | | | | | |
| phate + H2O | | (Fpk) | | | | | | | |
| D-fructose 6-phos- | 4.1.2.22 | fructose 6- | xfp | Bifidobacterium | phosphoketolase | EMBL: | 217 | D6PAH1 | 218 |
| phate + phosphate ↔ | | phosphate | | breve | | ADF97524.1 | | | |
| acetyl phosphate + D- | | phospho- | | | | | | | |
| erythrose 4-phos- | | ketolase | | | | | | | |
| phate + H2O | | (Fpk) | | | | | | | |
| Acetyl-CoA + | 2.3.1.8 | Phosphate | pta | E. coli | Phosphate | GeneID: | 219 | P0A9M8 | 220 |
| phosphate ↔ CoA + | | acetyl- | | | acetyltransferase | 946778 | | | |
| acetyl phosphate. | | transferase | | | | | | | |
| Acetyl-CoA + | 2.3.1.8 | Phosphate | pta | Clostridium | Phosphate | GeneID: | 221 | P71103 | 222 |
| phosphate ↔ CoA + | | acetyl- | | acetobutylicum | acetyltransferase | 1117925 | | | |
| acetyl phosphate. | | transferase | | | | | | | |
| hydroxypyruvate + | 4.1.1.- | Hydroxy- | kivd | Lactococcus | a-ketoisovalerate | GenBank: | 223 | Q684J7 | 224 |
| H ↔ CO2 + | | pyruvate | | lactis | decarboxylase | AJ746364.1 | | | |
| glycolaldehyde | | decarboxylase | | | | | | | |
| hydroxypyruvate + | 4.1.1.- | Hydroxy- | sucA | E. coli | 2-oxoglutarate | GeneID: | 225 | P0AFG3 | 226 |
| H ↔ CO2 + | | pyruvate | | | decarboxylase | 945303 | | | |
| glycolaldehyde | | decarboxylase | | | | | | | |
| 3-phospho-D-glycerate + | 1.1.1.95 | D-3- | serA | E. coli | D-3- | GeneID: | 227 | P0A9T0 | 228 |
| NAD+ ↔ 3-phospho- | | phospho- | | | phosphoglycerate | 945258 | | | |
| hydroxypyruvate + | | glycerate | | | dehydrogenase | | | | |
| NADH + H+ | | dehydrogenase | | | | | | | |
| 3-phospho-L-serine + | 2.6.1.52 | Phosphoserine | serC | E. coli | Phosphoserine | GeneID: | 229 | P23721 | 230 |
| 2-oxoglutarate ↔ L- | | amino- | | | aminotransferase | 945527 | | | |
| glutamate + 3- | | transferase | | | | | | | |
| phospho- | | | | | | | | | |
| hydroxypyruvate | | | | | | | | | |
| 3-phospho- | — | 3-phospho- | yeaB | E. coli | putative CoA | GeneID: | 231 | P43337 | 232 |
| hydroxypyruvate + | | hydroxy | (nudL) | | pyrophos | 946330 | | | |
| H2O → hydroxy- | | pyruvate | | | phohydrolase | | | | |
| pyruvate + phosphate | | phosphatase | | | | | | | |
| 3-phospho-L-serine + | 3.1.3.3 | Phosphoserine | serB | E. coli | Phosphoserine | GeneID: | 233 | P0AGB0 | 234 |
| H2O → L-serine + | | | phosphatase | | phosphatase | 948913 | | | |
| phosphate | | | | | | | | | |
| L-serine + H+ → | 4.1.1.65 | serine | AtSDC | Arabidopsis | serine | GeneID: | 235 | Q9MA74 | 236 |
| ethanolamine + CO2 | | decarboxylase | (AT1G437 | thaliana | decarboxylase | 840958 | | | |
| | | | 10) | | | | | | |
| ethanolamine + | 1.4.3.8 | Ethanolamine | tynA | E. coli | amine oxidase | GeneID: | 237 | P46883 | 238 |
| oxygen + H2O → | | oxidase | | | | 945939 | | | |
| ammonium + hydrogen | | | | | | | | | |
| peroxide + | | | | | | | | | |
| glycolaldehyde | | | | | | | | | |
| ethanolamine + 2- | 2.6.1.- | Ethanolamine | alaA | E. coli | glutamate- | GeneID: | 239 | P0A959 | 240 |
| oxoglutarate → | | amino- | | | pyruvate amino- | 946772 | | | |
| glycolaldehyde + L- | | transferase | | | transferase | | | | |
| glutamate | | | | | | | | | |
| D-glycerate + NAD | 1.1.1.- | Hydroxy- | ghrB | E. coli | glyoxylate | GeneID: | 241 | P37666 | 242 |
| (P)+ ↔ hydroxy- | | pyruvate | | | reductase | 948074 | | | |
| pyruvate + NAD(P)H + | | reductase | | | | | | | |
| H+ | | | | | | | | | |
| pyruvate + L-serine ↔ | 2.6.1.51 | serine- | AGXT1 | Homo | serine- | GeneID: | 243 | P21549 | 244 |
| L-alanine + | | pyruvate | | sapiens | pyruvate | 189, | | | |
| hydroxypyruvate | | amino- | | | amino- | CCDS2543.1 | | | |
| | | transferase | | | transferase | | | | |
| 3-phospho-D-glycer- | 3.1.3.38 | 3-phospho- | phoA | E. coli | phospho- | GeneID: | 245 | P00634 | 246 |
| ate + H2O → | | glycerate | | | glycerate | 945041 | | | |
| D-glycerate +phosphate | | phosphatase | | | phosphatase | | | | |
| 2-phospho-D-glycer | 3.1.3.20 | 2- | phoA | E. coli | phospho- | GeneID: | 245 | P00634 | 246 |
| ate + H2O → D- | | phospho- | | | glycerate | 945041 | | | |
| glycerate + phosphate | | glycerate | | | phosphatase | | | | |
| | | phosphatase | | | | | | | |
| D-glycerate + ATP ↔ | 2.7.1.31 | Glycerate 3- | GLYK | Arabidopsis | Glycerate | GeneID: | 247 | Q944I4 | 248 |
| 3-phospho-D-glycer- | | kinase | | thaliana | 3-kinase | 844378, | | | |
| ate + ADP + H+ | | | | | | mRNA | | | |
| | | | | | | NM_179581.2 | | | |
| D-glycerate + ATP ↔ | 2.7.1.165 | Glycerate 2- | glxK | E. coli | Glycerate | GeneID: | 249 | P77364 | 250 |
| 2-phospho-D-glycer- | | kinase | | | 2-kinase | 945129 | | | |
| ate +ADP + H+ | | | | | | | | | |
| D-glycerate + ATP ↔ | 2.7.1.165 | Glycerate 2- | garK | E. coli | Glycerate | GeneID: | 251 | P23524 | 252 |
| 2-phospho-D-glycer- | | kinase | | | 2-kinase | 947632 | | | |
| ate +ADP + H+ | | | | | | | | | |

### D-Tagatose 3-Epimerase (EC 5.1.3.31)

[0170] The present disclosure describes enzymes that can catalyze the epimerization of various ketoses at the C-3 position, interconverting D-fructose and D-psicose, D-tagatose and D-sorbose, D-ribulose and D-xylulose, and L-ribulose and L-xylulose. The specificity depends on the species. The enzymes from Pseudomonas cichorii and Rhodobacter sphaeroides require Mn²⁺. In one embodiment, the enzyme is D-tagatose 3-epimerase (dte). In another embodiment, the D-tagatose 3-epimerase catalyzes the conversion of D-xylulose to D-ribulose.

[chemical structure]

[0171] In one embodiment, the D-tagatose 3-epimerase is encoded by one or more nucleic acid molecules obtained from a microorganism selected from the group consisting of Pseudomonas sp., Mesorhizobium sp. and Rhodobacter sp. In some embodiments, the D-tagatose 3-epimerase is encoded by one or more nucleic acid molecules obtained from a microorganism selected from the group consisting of Pseudomonas cichorii, Pseudomonas sp. ST-24, Mesorhizobium loti and Rhodobacter sphaeroides. In some embodiments, the one or more nucleic acid molecules is dte and/or FJ851309.1, or homolog thereof. In a further embodiment, the D-tagatose 3-epimerase comprises an amino acid sequence selected from the group consisting of SEQ ID NOs: 3 and 5. In yet a further embodiment, the D-tagatose 3-epimerase is encoded by a nucleic acid sequence selected from the group consisting of SEQ ID NOs: 1, 2 and 4.

[0172] D-tagatose 3-epimerase may also be known as L-ribulose 3-epimerase or ketose 3-epimerase.

### D-ribulokinase (EC 2.7.1.16)

[0173] The present disclosure describes enzymes that can catalyze the following reactions:

[0174] L-fuculose+ATP→L-fuculose 1-phosphate+ADP+H+

[0175] D-ribulose+ATP→D-ribulose 1-phosphate+ADP+H+

[0176] D-ribulokinase may also be known as L-fuculokinase, fuculokinase, ATP: L-fuculose 1-phosphotransferase or L-fuculose kinase.

[0177] Thus, in some embodiments, the disclosure provides for an enzyme that plays roles in the fucose degradation pathway, the super pathway of fucose and rhamnose degradation and/or the D-arabinose degradation I pathway.

[0178] In some embodiments, the enzyme can function as both an L-fucolokinase and a D-ribulokinase, the second enzyme of the L-fucose and D-arabinose degradation pathways, respectively.

[0179] In particular embodiments, the enzyme converts D-ribulose to D-ribulose-1-phosphate. In one embodiment, the D-ribulokinase is encoded by one or more nucleic acid molecules obtained from E. coli. In some embodiments, the one or more nucleic acid molecules is fucK, or homolog thereof. In a further embodiment, the D-ribulokinase comprises an amino acid sequence set forth in SEQ ID NO: 8. In yet a further embodiment, the D-ribulokinase is encoded by a nucleic acid sequence selected from the group consisting of SEQ ID NOs: 6 and 7.

### D-Ribulose-1-Phosphate Aldolase (EC 4.1.2.17)

[0180] The present disclosure describes enzymes that can catalyze the following reversible reactions:

[0181] L-fuculose 1-phosphate⇄(S)-lactaldehyde+dihydroxy acetone phosphate (DHAP)

[0182] D-ribulose 1-phosphate⇄glycolaldehyde+dihydroxy acetone phosphate (DHAP)

[0183] D-ribulose-1-phosphate aldolase may also be known as L-fuculose-phosphate aldolase, L-fuculose 1-phosphate aldolase or L-fuculose-1-phosphate (S)-lactaldehyde-lyase.

[0184] Thus, in some embodiments, the disclosure provides for an enzyme that plays roles in the fucose degradation pathway, the super pathway of fucose and rhamnose degradation and/or the D-arabinose degradation I pathway. In one embodiment, the enzyme may use Zn²⁺ as a cofactor. In another embodiment, an inhibitor of this enzyme may be phosphoglycolohydroxamate.

[0185] In some embodiments, the enzyme can function as both an L-fuculose-phosphate aldolase and a D-ribulose-phosphate aldolase, the third enzyme of the L-fucose and D-arabinose degradation pathways, respectively.

[0186] The substrate specificity of the enzyme has been tested with a partially purified preparation from an E. coli strain.

[0187] Crystal structures of the enzyme and a number of point mutants have been solved. The combination of structural data and enzymatic activity of mutants allowed modelling and refinement of the catalytic mechanism of the enzyme. The enantiomeric selectivity of the enzyme has been studied.

[0188] In particular embodiments, the enzyme converts D-ribulose-1-phosphate to glycolaldehyde and DHAP. In one embodiment, the D-ribulose-1-phosphate aldolase is encoded by one or more nucleic acid molecules obtained from E. coli. In some embodiments, the one or more nucleic acid molecules is fucA, or homolog thereof. In a further embodiment, the D-ribulose-1-phosphate aldolase comprises an amino acid sequence set forth in SEQ ID NO: 11. In yet a further embodiment, the D-ribulose-1-phosphate aldolase is encoded by a nucleic acid sequence selected from the group consisting of SEQ ID NOs: 9 and 10.

### Glycolaldehyde Reductase (EC 1.1.1.77)

[0189] The present disclosure describes enzymes that can catalyze the following reversible reactions:

[0190] ethylene glycol+NAD+⇄glycolaldehyde+NADH+H+

[0191] (S)-propane-1,2-diol+NAD+⇄(S)-lactaldehyde+NADH+H+

[0192] Glycolaldehyde reductase may also be known as lactaldehyde reductase, propanediol oxidoreductase, (R) [or(S)]-propane-1,2-diol:NAD+ oxidoreductase or L-1,2-propanediol oxidoreductase.

[0193] Thus, in some embodiments, the disclosure provides for an enzyme that plays roles in the ethylene glycol degradation pathway, the super pathway of glycol metabolism and degradation, the anaerobic L-lactaldehyde degradation pathway and/or the super pathway of fucose and rhamnose degradation. In one embodiment, the enzyme may use Fe²⁺ as a cofactor.

[0194] L-1,2-propanediol oxidoreductase is an iron-dependent group III dehydrogenase. It anaerobically reduces L-lactaldehyde, a product of both the L-fucose and L-rhamnose catabolic pathways, to L-1,2-propanediol, which is then excreted from the cell.

[0195] Crystal structures of the enzyme have been solved, showing a domain-swapped dimer in which the metal, cofactor and substrate binding sites could be located. An aspartate and three conserved histidine residues are required for Fe′ binding and enzymatic activity.

[0196] In vitro, the enzyme can be reactivated by high concentrations of NAD+ and efficiently inactivated by a mixture of Fe′ and ascorbate or Fe²⁺ and H₂O₂. Metal-catalyzed oxidation of the conserved His277 residue is proposed to be the cause of the inactivation.

[0197] Expression of FucO enables engineered one-turn reversal of the β-oxidation cycle. FucO activity contributes to the conversion of isobutyraldehyde to isobutanol in an engineered strain.

[0198] In particular embodiments, the enzyme converts glycolaldehyde to MEG. In some embodiments, the glycolaldehyde reductase is from Escherichia coli. In some embodiments, the glycolaldehyde reductase is encoded by the fucO gene.

[0199] In one embodiment, the glycolaldehyde reductase is encoded by one or more nucleic acid molecules obtained from a microorganism selected from E. coli and S. cerevisiae. In another embodiment, the one or more nucleic acid molecules is selected from gldA, GRE2, GRE3, yqhD, ydjG, fucO, yafB (dkgB), and/or yqhE (dkgA), or homolog thereof. In another embodiment, the one or more nucleic acid molecules is yqhD. In some embodiments, the yqhD comprises a G149E mutation. In a further embodiment, the glycolaldehyde reductase comprises an amino acid sequence selected from the group consisting of SEQ ID NOs: 13, 15, 17, 20, 23, 25, 28, 30 and 32. In yet a further embodiment, the glycolaldehyde reductase is encoded by a nucleic acid sequence selected from the group consisting of SEQ ID NOs: 12, 14, 16, 18, 19, 21, 22, 24, 26, 27, 29 and 31.

### Aldehyde Reductases

[0200] A number of aldehyde reductases may be used to convert glycolaldehyde to MEG.

[0201] An NADPH-dependent aldehyde reductase (YqhD) can catalyze the following reactions:

[0202] acetol+NADP+⇄methylglyoxal+NADPH+H+ (reversible, EC 1.1.1.-)

[0203] an alcohol+NADP+⇄an aldehyde+NADPH+H+ (reversibility unspecified, EC 1.1.1.2)

[0204] an aldehyde+NADP++H2O→a carboxylate+NADPH+2 H+ (EC 1.2.1.4)

[0205] 1,3-propanediol+NADP+⇄3-hydroxypropionaldehyde+NADPH+H+ (reversibility unspecified, EC 1.1.1.-)

[0206] D-3,4-dihydroxybutanal+NADPH⇄1,3,4-butanetriol+NADP+ (reversibility unspecified)

[0207] YqhD is an NADPH-dependent aldehyde reductase that may be involved in glyoxal detoxification and/or be part of a glutathione-independent response to lipid peroxidation.

[0208] It has been reported that various alcohols, aldehydes, amino acids, sugars and a-hydroxy acids have been tested as substrates for YqhD. The purified protein only shows NADP-dependent alcohol dehydrogenase activity, with a preference for alcohols longer than C(3), but with Km values in the millimolar range, suggesting that they are not the physiological substrates. In contrast, YqhD does exhibit short-chain aldehyde reductase activity with substrates such as propanaldehyde, acetaldehyde, and butanaldehyde, as well as acrolein and malondialdehyde. In a metabolically engineered strain, phenylacetaldehyde and 4-hydroxyphenylacetaldehyde are reduced to 2-phenylethanol and 2-(4-hydroxyphenyl)ethanol by the endogenous aldehyde reductases YqhD, YjgB, and YahK.

[0209] Overexpression of YqhD increases 1,3-propanediol oxidoreductase activity of the cell. E. coli has been engineered to express YqhD for the industrial production of 1,3-propanediol. YqhD activity contributes to the production of isobutanol, 1,2-propanediol, 1,2,4-butanetriol and acetol as well. Mutation of yqhD enables production of butanol by an engineered one-turn reversal of the β-oxidation cycle.

[0210] YqhD has furfural reductase activity, which appears to cause growth inhibition due to depletion of NADPH in metabolically engineered strains that produce alcohol from lignocellulosic biomass.

[0211] The crystal structure of YqhD has been solved at 2 Å resolution. YqhD is an asymmetric dimer of dimers, and the active site contains a Zn²⁺ ion. The NADPH cofactor is modified by hydroxyl groups at positions 5 and 6 in the nicotinamide ring.

[0212] Overexpression of yqhD leads to increased resistance to reactive oxygen-generating compounds such as hydrogen peroxide, paraquat, chromate and potassium tellurite. A yqhD deletion mutant shows increased sensitivity to these compounds and to glyoxal, and contains increased levels of reactive aldehydes that are generated during lipid peroxidation. Conversely, yqhD deletion leads to increased furfural tolerance.

[0213] In particular embodiments, an NADPH-dependent aldehyde reductase converts glycolaldehyde to MEG. In some embodiments, the NADPH-dependent aldehyde reductase is from Escherichia coli. In some embodiments, the NADPH-dependent aldehyde reductase is encoded by the yqhD gene.

[0214] A multi-functional methylglyoxal reductase (DkgA) can catalyze the following reactions:

[0215] acetol+NADP+⇄methylglyoxal+NADPH+H+ (the reaction is physiologically favored in the opposite direction, EC 1.1.1.-)

[0216] isobutanol+NADP+⇄isobutanal+NADPH+H+ (reversibility unspecified, EC 1.1.1.-)

[0217] ethyl-(2R)-methyl-(3S)-hydroxybutanoate+NADP+⇄ethyl-2-methylacetoacetate+NADPH+H+ (reversibility unspecified, EC 1.1.1.-)

[0218] 2-keto-L-gulonate+NADP+←2,5-didehydro-D-gluconate+NADPH+H+ (the reaction is favored in the opposite direction, EC 1.1.1.346)

[0219] DkgA (YqhE) belongs to the aldo-keto reductase (AKR) family and has been shown to have methylglyoxal reductase and beta-keto ester reductase activity.

[0220] dkgA is reported to encode a 2,5-diketo-D-gluconate reductase (25DKGR) A, one of two 25DKG reductases in E. coli. The enzyme uses NADPH as the preferred electron donor and is thought to be involved in ketogluconate metabolism. The specific activity of the enzyme towards 2,5-diketo-D-gluconate is reported to be almost 1000-fold lower than its activity towards methylglyoxal.

[0221] Due to its low Km for NADPH, reduction of furans by DkgA may deplete NADPH pools and thereby limit cellular biosynthesis. A broad survey of aldehyde reductases showed that DkgA was one of several endogenous aldehyde reductases that contribute to the degradation of desired aldehyde end products of metabolic engineering.

[0222] A crystal structure of DkgA has been solved at 2.16 Å resolution.

[0223] In particular embodiments, a multi-functional methylglyoxal reductase converts glycolaldehyde to MEG. In some embodiments, the multi-functional methylglyoxal reductase is from Escherichia coli. In some embodiments, the multi-functional methylglyoxal reductase is encoded by the dkgA gene.

[0224] A multi-functional methylglyoxal reductase (DkgB) can catalyze the following reactions:

[0225] acetol+NADP+⇄methylglyoxal+NADPH+H+ (the reaction is physiologically favored in the opposite direction, EC 1.1.1.-)

[0226] 4-nitrobenzyl alcohol+NADP+⇄4-nitrobenzaldehyde+NADPH+H+ (reversibility unspecified, EC 1.1.1.91)

[0227] 2-keto-L-gulonate+NADP+←2,5-didehydro-D-gluconate+NADPH+H+ (the reaction is favored in the opposite direction, EC 1.1.1.346)

[0228] DkgB (YafB) is a member of the aldo-keto reductase (AKR) subfamily 3F. DkgB was shown to have 2,5-diketo-D-gluconate reductase, methylglyoxal reductase and 4-nitrobenzaldehyde reductase activities.

[0229] dkgB is reported to encode 2,5-diketo-D-gluconate reductase (25DKGR) B, one of two 25DKG reductases in E. coli. The enzyme uses NADPH as the preferred electron donor and is thought to be involved in ketogluconate metabolism. However, the specific activity of the enzyme towards 2,5-diketo-D-gluconate is reported to be almost 1000-fold lower than its activity towards methylglyoxal.

[0230] In particular embodiments, a multi-functional methylglyoxal reductase converts glycolaldehyde to MEG. In some embodiments, the multi-functional methylglyoxal reductase is from Escherichia coli. In some embodiments, the multi-functional methylglyoxal reductase is encoded by the dkgB gene.

[0231] A methylglyoxal reductase (YeaE) can catalyze the following reaction:

[0232] acetol+NADP+⇄methylglyoxal+NADPH+H+ (the reaction is physiologically favored in the opposite direction, EC 1.1.1.-)

[0233] YeaE has been shown to have methylglyoxal reductase activity.

[0234] The subunit structure of YeaE has not been determined, but its amino acid sequence similarity to the aldo-keto reductases DkgA (YqhE) and DkgB (YafB) suggests that it may be monomeric.

[0235] In particular embodiments, a methylglyoxal reductase converts glycolaldehyde to MEG. In some embodiments, the methylglyoxal reductase is from Escherichia coli. In some embodiments, the methylglyoxal reductase is encoded by the yeaE gene.

[0236] A L-glyceraldehyde 3-phosphate reductase (yghZ) can catalyze the following reactions:

[0237] L-glyceraldehyde 3-phosphate+NADPH+H+→sn-glycerol 3-phosphate+NADP+ (EC 1.1.1.-)

[0238] acetol+NADP+⇄methylglyoxal+NADPH+H+ (the reaction is physiologically favored in the opposite direction, EC 1.1.1.-)

[0239] YghZ is an L-glyceraldehyde 3-phosphate (L-GAP) reductase. The enzyme is also able to detoxify methylglyoxal at a low rate. YghZ defines the AKR14 (aldo-keto reductase 14) protein family.

[0240] L-GAP is not a natural metabolite and is toxic to E. coli. L-GAP is a substrate of both the glycerol-3-phosphate and hexose phosphate transport systems of E. coli K-12. It has been postulated that the physiological role of YghZ is the detoxification of L-GAP, which may be formed by non-enzymatic racemization of GAP or by an unknown cellular process.

[0241] The crystal structure of the E. coli enzyme has been determined and is suggested to be a tetramer. However, others have found that the protein forms an octamer based on gel filtration and electron microscopy studies.

[0242] In particular embodiments, a L-glyceraldehyde 3-phosphate reductase converts glycolaldehyde to MEG. In some embodiments, the L-glyceraldehyde 3-phosphate reductase is from Escherichia coli. In some embodiments, the L-glyceraldehyde 3-phosphate reductase is encoded by the yghZ gene.

[0243] An L-1,2-propanediol dehydrogenase/glycerol dehydrogenase (GldA) can catalyze the following reactions:

[0244] (S)-propane-1,2-diol+NAD+⇄acetol+NADH+H+ (reversible reaction)

[0245] aminoacetone+NADH+H+→(R)-1-aminopropan-2-ol+NAD+ (EC 1.1.1.75)

[0246] glycerol+NAD+⇄dihydroxyacetone+NADH+H+ (reversible reaction, EC 1.1.1.6)

[0247] The physiological function of the GldA enzyme has long been unclear. The enzyme was independently isolated as a glycerol dehydrogenase and a D-1-amino-2-propanol:NAD+ oxidoreductase. At that time, D-1-amino-2-propanol was thought to be an intermediate for the biosynthesis of vitamin B12, and although E. coli is unable to synthesize vitamin B12 de novo, enzymes catalyzing the synthesis of this compound were sought. It was later found that GldA was responsible for both activities.

[0248] The primary in vivo role of GldA was recently proposed to be the removal of dihydroxyacetone by converting it to glycerol. However, a dual role in the fermentation of glycerol has also recently been established. Glycerol dissimilation in E. coli can be accomplished by two different pathways. The glycerol and glycerophosphodiester degradation pathway requires the presence of a terminal electron acceptor and utilizes an ATP-dependent kinase of the Glp system, which phosphorylates glycerol to glycerol-3-phosphate. However, upon inactivation of the kinase and selection for growth on glycerol, it was found that an NAD+-linked dehydrogenase, GldA, was able to support glycerol fermentation. Recently, it was shown that GldA was involved in glycerol fermentation both as a glycerol dehydrogenase, producing dihydroxyacetone, and as a 1,2-propanediol dehydrogenase, regenerating NAD+ by producing 1,2-propanediol from acetol.

[0249] The enzyme is found in two catalytically active forms, a large form of eight subunits and a small form of two subunits. The large form appears to be the major species.

[0250] In particular embodiments, an L-1,2-propanediol dehydrogenase/glycerol dehydrogenase converts glycolaldehyde to MEG. In some embodiments, the L-1,2-propanediol dehydrogenase/glycerol dehydrogenase is from Escherichia coli. In some embodiments, the L-1,2-propanediol dehydrogenase/glycerol dehydrogenase is encoded by the gldA gene.

[0251] An NADPH-dependent methylglyoxal reductase (GRE2) from Saccharomyces cerevisiae can catalyze the following reactions:

[0252] (S)-lactaldehyde+NADP+⇄methylglyoxal+NADPH

[0253] 3-methylbutanol+NAD(P)+⇄3-methylbutanal+NAD(P)H

[0254] Gre2 is a versatile enzyme that catalyzes the stereoselective reduction of a broad range of substrates including aliphatic and aromatic ketones, diketones, as well as aldehydes, using NADPH as the cofactor.

[0255] The crystal structures of Gre2 from S. cerevisiae in an apo-form at 2.00 Å and NADPH-complexed form at 2.40 Å resolution have been solved. Gre2 forms a homodimer, each subunit of which contains an N-terminal Rossmann-fold domain and a variable C-terminal domain, which participates in substrate recognition. The induced fit upon binding to the cofactor NADPH makes the two domains shift toward each other, producing an interdomain cleft that better fits the substrate. Computational simulation combined with site-directed mutagenesis and enzymatic activity analysis enabled characterization of a potential substrate-binding pocket that determines the stringent substrate stereoselectivity for catalysis.

[0256] Gre2 catalyzes the irreversible reduction of the cytotoxic compound methylglyoxal (MG) to (S)-lactaldehyde as an alternative to detoxification of MG by glyoxalase I GLO1. MG is synthesized via a bypath of glycolysis from dihydroxyacetone phosphate and is believed to play a role in cell cycle regulation and stress adaptation. GRE2 also catalyzes the reduction of isovaleraldehyde to isoamylalcohol. The enzyme serves to suppress isoamylalcohol-induced filamentation by modulating the levels of isovaleraldehyde, the signal to which cells respond by filamentation. GRE2 is also involved in ergosterol metabolism.

[0257] In particular embodiments, an NADPH-dependent methylglyoxal reductase converts glycolaldehyde to MEG. In some embodiments, the NADPH-dependent methylglyoxal reductase is from S. cerevisiae. In some embodiments, the NADPH-dependent methylglyoxal reductase is encoded by the GRE2 gene.

[0258] Thiolase/Acetyl coenzyme A acetyltransferase (EC 2.3.1.9)

[0259] The present disclosure describes enzymes that can catalyze the following reaction:

[0260] 2 acetyl-CoA⇄acetoacetyl-CoA+coenzyme A (reversible reaction)

[0261] Thiolase/Acetyl coenzyme A acetyltransferase may also be known as acetyl-CoA-C-acetyltransferase, acetoacetyl-CoA thiolase, acetyl-CoA:acetyl-CoA C-acetyltransferase or thiolase II.

[0262] Thus, in some embodiments, the disclosure provides for an enzyme that plays a role in acetoacetate degradation (to acetyl CoA). In one embodiment, an inhibitor of this enzyme may be acetoacetyl-CoA.

[0263] In particular embodiments, the enzyme converts acetyl-CoA to acetoacetyl-CoA. In one embodiment, the thiolase or acetyl coenzyme A acetyltransferase is encoded by one or more nucleic acid molecules obtained from a microorganism selected from the group consisting of Clostridium sp., Bacillus sp., E. coli, Saccharomyces sp. and Marinobacter sp. In some embodiments, the thiolase or acetyl coenzyme A acetyltransferase is encoded by one or more nucleic acid molecules obtained from a microorganism selected from the group consisting of Clostridium acetobutylicum, Clostridium thermosaccharolyticum, Bacillus cereus, E. coli, Saccharomyces cerevisiae and Marinobacter hydrocarbonoclasticus. In some embodiments, the one or more nucleic acid molecules is thlA, atoB and/or ERG10, or homolog thereof. In a further embodiment, the thiolase or acetyl coenzyme A acetyltransferase comprises an amino acid sequence selected from the group consisting of SEQ ID NOs: 35, 37 and 40. In yet a further embodiment, the thiolase or acetyl coenzyme A acetyltransferase is encoded by a nucleic acid sequence selected from the group consisting of SEQ ID NOs: 33, 34, 36, 38 and 39.

### Acetyl-CoA:Acetoacetate-CoA Transferase (EC 2.8.3.-)

[0264] The present disclosure describes enzymes that can catalyze the following reaction:

[0265] acetoacetate+acetyl-CoA⇄acetoacetyl-CoA+acetate (reversible reaction, EC 2.8.3.-)

[0266] Acetyl-CoA:acetoacetate-CoA transferase may also be known as acetate:acetoacetyl-CoA transferase or acetoacetyl-CoA transferase.

[0267] Thus, in some embodiments, the disclosure provides for an enzyme that plays a role in acetoacetate degradation (to acetyl CoA). In one embodiment, inhibitors of this enzyme may include acetyl-CoA and coenzyme A.

[0268] The growth of E. coli on short-chain fatty acids (C3-C6) requires the activation of the acids to their respective thioesters. This activation is catalyzed by acetoacetyl-CoA transferase. The reaction takes place in two half-reactions which involves a covalent enzyme-CoA. The enzyme undergoes two detectable conformational changes during the reaction. It is thought likely that the reaction proceeds by a ping-pong mechanism. The enzyme can utilize a variety of short-chain acyl-CoA and carboxylic acid substrates but exhibits maximal activity with normal and 3-keto substrates.

[0269] In particular embodiments, the enzyme converts acetoacetyl-CoA to acetoacetate. In some embodiments, the acetyl-CoA:acetoacetate-CoA transferase is from Clostridium spp. In some embodiments, the acetyl-CoA:acetoacetate-CoA transferase is from Clostridium acetobutylicum. In some embodiments, the acetyl-CoA:acetoacetate-CoA transferase is from Escherichia coli. In some embodiments, the acetyl-CoA:acetoacetate-CoA transferase is encoded by the atoA and atoD genes. In another embodiment, the subunit composition of acetoacetyl-CoA transferase is [(AtoA)₂][(AtoD)₂], with (AtoA)₂ being the β complex and (AtoD)₂ being the α complex. In one embodiment, the acetyl-CoA:acetoacetate-CoA transferase is a fused acetyl-CoA:acetoacetate-CoA transferase: α subunit/β subunit. In another embodiment, the acetyl-CoA:acetoacetate-CoA transferase is encoded by the ydiF gene.

### Acetate:Acetoacetyl-CoA Hydrolase (EC 3.1.2.11)

[0270] The present disclosure describes enzymes that can catalyze the following reaction:

[0271] acetoacetyl-CoA+H₂O⇄CoA+acetoacetate

[0272] Acetoacetyl-CoA hydrolase may also be known as acetoacetyl coenzyme A hydrolase, acetoacetyl CoA deacylase or acetoacetyl coenzyme A deacylase.

[0273] This enzyme belongs to the family of hydrolases, specifically those acting on thioester bonds.

[0274] In particular embodiments, the enzyme converts acetoacetyl-CoA to acetoacetate. In some embodiments, the acetate:acetoacetyl-CoA hydrolase is from Clostridium spp. In some embodiments, the acetate:acetoacetyl-CoA hydrolase is from Clostridium acetobutylicum. In another embodiment, the Acetoacetyl-CoA hydrolase is encoded by the ctfA (subunit A) and/or ctfB (subunit B) genes.

[0275] In a further embodiment, the acetyl-CoA:acetoacetate-CoA transferase or acetate:acetoacetyl-CoA hydrolase comprises an amino acid sequence selected from the group consisting of SEQ ID NOs: 43, 46, 97, 99, 101 and 103. In yet a further embodiment, the acetyl-CoA:acetoacetate-CoA transferase or acetate:acetoacetyl-CoA hydrolase is encoded by a nucleic acid sequence selected from the group consisting of SEQ ID NOs: 41, 42, 44, 45, 96, 98, 100 and 102.

### Acetoacetate Decarboxylase (EC 4.1.1.4)

[0276] The present disclosure describes enzymes that can catalyze the following reaction:

[0277] acetoacetate+H+→acetone+CO₂

[0278] Acetoacetate decarboxylase may also be known as ADC, AADC or acetoacetate carboxy-lyase.

[0279] Thus, in some embodiments, the disclosure provides for an enzyme that plays roles in isopropanol biosynthesis, pyruvate fermentation to acetone, the super pathway of Clostridium acetobutylicum acidogenic and solventogenic fermentation and/or the super pathway of Clostridium acetobutylicum solventogenic fermentation.

[0280] Acetoacetate decarboxylase (ADC) plays a key role in solvent production in Clostridium acetobutylicum. During the acidogenic phase of growth, acids accumulate causing a metabolic shift to solvent production. In this phase acids are re-assimilated and metabolized to produce acetone, butanol and ethanol.

[0281] Preliminary purification and crystallization of the enzyme has revealed that a lysine residue is implicated in the active site. The enzyme is a large complex composed of 12 copies of a single type of subunit.

[0282] The enzyme of Clostridium acetobutylicum ATCC 824 has been purified and the adc gene encoding it cloned. The enzyme has also been purified from the related strain Clostridium acetobutylicum DSM 792 and the gene cloned and sequenced. The decarboxylation reaction proceeds by the formation of a Schiff base intermediate.

[0283] ADC is a key enzyme in acid uptake, effectively pulling the CoA-transferase reaction in the direction of acetoacetate formation.

[0284] In particular embodiments, the enzyme converts acetoacetate to acetone. In one embodiment, the acetoacetate decarboxylase is encoded by one or more nucleic acid molecules obtained from a microorganism selected from the group consisting of Clostridium sp., Bacillus sp., Chromobacterium sp. and Pseudomonas sp. In another embodiment, the acetoacetate decarboxylase is encoded by one or more nucleic acid molecules obtained from a microorganism selected from the group consisting of Clostridium acetobutylicum, Clostridium beijerinckii, Clostridium cellulolyticum, Bacillus polymyxa, Chromobacterium violaceum and Pseudomonas putida. In some embodiments, the one or more nucleic acid molecules encoding the acetoacetate decarboxylase is adc, or homolog thereof. In a further embodiment, the acetoacetate decarboxylase comprises an amino acid sequence selected from the group consisting of SEQ ID NOs: 49 and 52. In yet another embodiment, the acetoacetate decarboxylase is encoded by a nucleic acid sequence selected from the group consisting of SEQ ID NOs: 47, 48, 50 and 51.

### Alcohol Dehydrogenase (EC 1.1.1.-)

[0285] The present disclosure describes enzymes that can catalyze the reversible oxidation of primary or secondary alcohols to aldehydes or ketones, respectively. In one embodiment, the enzyme is a secondary alcohol dehydrogenase (S-ADH) and catalyzes the reduction of ketones such as acetone into secondary alcohols such as 2-propanol (isopropanol).

[0286] In some embodiments the S-ADH is from Burkholderia sp. In some embodiments, the S-ADH is from Burkholderia sp. AIU 652. In some embodiments, the S-ADH is from Alcaligenes sp. In some embodiments, the S-ADH is from Alcaligenes eutrophus. In some embodiments, the S-ADH is from Clostridium sp. In some embodiments, the S-ADH is from Clostridium ragsdalei. In some embodiments, the S-ADH is from Clostridium beijerinckii. In some embodiments, the S-ADH is from Thermoanaerobacter sp. In some embodiments, the S-ADH is from Thermoanaerobacter brockii. In some embodiments, the S-ADH is from Thermoanaerobacter ethanolicus (Clostridium thermohydrosulfuricum). In some embodiments, the S-ADH is encoded by the adhB gene. In some embodiments, the S-ADH is from the trypanosomatid Phytomonas sp. In some embodiments, the S-ADH is from Rhodococcus sp. In some embodiments, the S-ADH is from Rhodococcus ruber. In some embodiments, the S-ADH is from Methanobacterium palustre. In some embodiments, the S-ADH is from methanogenic archaea Methanogenium liminatans. In some embodiments, the S-ADH is from the parasitic protist Entamoeba histolytica (EhAdh1). In some embodiments, the S-ADH is from parasitic protozoan Tritrichomonas foetus. In some embodiments, the S-ADH is from human parasite Trichomonas vaginalis.

[0287] In some embodiments, the S-ADH is predicted from homology and can be from Thermoanaerobacter mathranii, Micrococcus luteus, Nocardiopsis alba, Mycobacterium hassiacum, Helicobacter suis, Candida albicans, Candida parapsilosis, Candida orthopsilosis, Candida metapsilosis, Grosmannia clavigera and Scheffersomyces stipitis.

[0288] In some embodiments, the alcohol dehydrogenase has at least 70% sequence identity, at least 80% sequence identity, or at least 90% sequence identity with an alcohol dehydrogenase from Clostridium sp. In other embodiments, the alcohol dehydrogenase is an alcohol dehydrogenase selected from Clostridium beijerinckii adh and Clostridium carboxidivorans adh. In a further embodiment, the alcohol dehydrogenase comprises an amino acid sequence selected from the group consisting of SEQ ID NOs: 138 and 140. In yet another embodiment, the alcohol dehydrogenase is encoded by a nucleic acid sequence selected from the group consisting of SEQ ID NOs: 136, 137, and 139.

### Dehydratase (EC 4.2.1.-)

[0289] The present disclosure describes enzymes that can catalyze the following reactions:

[0290] isopropanol⇄propene+H₂0

### D-Xylulose 1-Kinase (EC 2.7.1.-)

[0291] The present disclosure describes enzymes that can catalyze the conversion of D-xylulose to D-xylulose-1-phosphate. In some embodiments, the conversion can be catalyzed by a human ketohexokinase C (khk-C), also known as fructokinase.

[0292] Ketohexokinase, or fructokinase, phosphorylates fructose to fructose-1-phosphate. The enzyme is involved in fructose metabolism, which is part of carbohydrate metabolism. It is found in the liver, intestine and kidney cortex.

[0293] In human liver, purified fructokinase, when coupled with aldolase, has been discovered to contribute to an alternative mechanism to produce oxalate from xylitol. In coupled sequence, fructokinase and aldolase produce glycolaldehyde, a precursor to oxalate, from D-xylulose via D-xylulose 1-phosphate.

[0294] In particular embodiments, the enzyme converts D-xylulose to D-xylulose-1-phosphate. In one embodiment, the D-xylulose 1-kinase is encoded by one or more nucleic acid molecules obtained from Homo sapiens. In some embodiments, the one or more nucleic acid molecules encoding the D-xylulose 1-kinase is ketohexokinase C (khk-C), or homolog thereof. In another embodiment, the one or more nucleic acid molecules encoding the D-xylulose 1-kinase comprises an amino acid sequence set forth in SEQ ID NOs: 55 or 256. In a further embodiment, the one or more nucleic acid molecules encoding the D-xylulose 1-kinase is encoded by a nucleic acid sequence selected from the group consisting of SEQ ID NOs: 53 and 54.

### D-Xylulose-1-Phosphate Aldolase (EC 4.1.2.-)

[0295] The present disclosure describes enzymes that can catalyze the conversion of D-xylulose-1-phosphate to glycolaldehyde and DHAP. In some embodiments, the conversion can be catalyzed by a human aldolase B, which is also known as fructose-bisphosphate aldolase B or liver-type aldolase.

[0296] Aldolase B is one of three isoenzymes (A, B, and C) of the class I fructose 1,6-bisphosphate aldolase enzyme (EC 4.1.2.13), and plays a key role in both glycolysis and gluconeogenesis. The generic fructose 1,6-bisphosphate aldolase enzyme catalyzes the reversible cleavage of fructose 1,6-bisphosphate (FBP) into glyceraldehyde 3-phosphate and dihydroxyacetone phosphate (DHAP) as well as the reversible cleavage of fructose 1-phosphate (F1P) into glyceraldehyde and dihydroxyacetone phosphate. In mammals, aldolase B is preferentially expressed in the liver, while aldolase A is expressed in muscle and erythrocytes and aldolase C is expressed in the brain. Slight differences in isozyme structure result in different activities for the two substrate molecules: FBP and fructose 1-phosphate. Aldolase B exhibits no preference and thus catalyzes both reactions, while aldolases A and C prefer FBP.

[0297] Aldolase B is a homotetrameric enzyme, composed of four subunits. Each subunit has a molecular weight of 36 kDa and contains an eight-stranded α/β barrel, which encloses lysine 229 (the Schiff-base forming amino acid that is key for catalysis).

[0298] In particular embodiments, the enzyme converts D-xylulose-1-phosphate to glycolaldehyde and DHAP. In one embodiment, the D-xylulose-1-phosphate aldolase is encoded by one or more nucleic acid molecules obtained from Homo sapiens. In another embodiment, the one or more nucleic acid molecules encoding the D-xylulose-1-phosphate aldolase is aldolase B (aldoB), or homolog thereof. In some embodiments, the one or more nucleic acid molecules encoding the D-xylulose-1-phosphate aldolase comprises an amino acid sequence set forth in SEQ ID NO: 58. In some embodiments, the one or more nucleic acid molecules encoding the D-xylulose-1-phosphate aldolase is encoded by a nucleic acid sequence selected from the group consisting of SEQ ID NOs: 56 and 57.

### D-Xylose Isomerase (EC 5.3.1.5)

[0299] The present disclosure describes enzymes that can catalyze the following reversible reaction:

[0300] D-xylopyranose⇄D-xylulose

[0301] D-xylose isomerase may also be known as xylose isomerase or D-xylose ketol-isomerase.

[0302] Thus, in some embodiments, the disclosure provides for an enzyme that plays a role in xylose degradation.

[0303] Xylose isomerase catalyzes the first reaction in the catabolism of D-xylose.

[0304] Two conserved histidine residues, H101 and H271, were shown to be essential for catalytic activity. The fluorescence of two conserved tryptophan residues, W49 and W188, is quenched during binding of xylose, and W49 was shown to be essential for catalytic activity. The presence of Mg²⁺, Mn²⁺ or Co²⁺ protects the enzyme from thermal denaturation.

[0305] The subunit composition has not been established experimentally.

[0306] In particular embodiments, the enzyme converts D-xylose to D-xylulose. In one embodiment, the recombinant microorganism further comprises an endogenous or exogenous xylose isomerase that catalyzes the conversion of D-xylose to D-xylulose. In one embodiment, the xylose isomerase is exogenous. In another embodiment, the xylose isomerase is encoded by one or more nucleic acid molecules obtained from Pyromyces sp or E. coli. In another embodiment, the one or more nucleic acid molecules encoding the xylose isomerase is xylA, or homolog thereof. In yet another embodiment, the one or more nucleic acid molecules encoding the xylose isomerase comprises an amino acid sequence selected from SEQ ID NOs: 95 and 144. In a further embodiment, the one or more nucleic acid molecules encoding the xylose isomerase is encoded by a nucleic acid sequence selected from the group consisting of SEQ ID NOs: 93, 94 and 143.

[0307] In some embodiments, a recombinant microorganism producing MEG or GA, or optionally, MEG or GA and one or more co-product, comprises a deletion, insertion, or loss of function mutation in a gene encoding a D-xylose isomerase to prevent conversion of D-xylose to D-xylulose and instead shunt the reaction toward the conversion of D-xylose to D-xylonate.

### D-Xylulose 5-Kinase/Xylulokinase

[0308] The present disclosure describes enzymes that can catalyze the following reactions:

[0309] D-xylulose+ATP→D-xylulose 5-phosphate+ADP+H+ (EC 2.7.1.17)

[0310] ATP+1-deoxy-D-xylulose→1-deoxy-D-xylulose 5-phosphate+ADP+H+ (EC 2.7.1.-)

[0311] D-xylulose 5-kinase may also be known as xylulose kinase or xylulokinase.

[0312] Xylulokinase catalyzes the phosphorylation of D-xylulose, the second step in the xylose degradation pathway, producing D-xylulose-5-phosphate, an intermediate of the pentose phosphate pathway.

[0313] In the absence of substrate, xylulokinase has weak ATPase activity. Xylulokinase can also catalyze the phosphorylation of 1-deoxy-D-xylulose. This would allow a potential salvage pathway for generating 1-deoxy-D-xylulose 5-phosphate for use in the biosynthesis of terpenoids, thiamine and pyridoxal. The rate of phosphorylation of 1-deoxy-D-xylulose is 32-fold lower than the rate of phosphorylation of D-xylulose.

[0314] The kinetic mechanism of the bacterial enzyme has been studied, suggesting a predominantly ordered reaction mechanism. The enzyme undergoes significant conformational changes upon binding of the substrate and of ATP. Two conserved aspartate residues, D6 and D233, were found to be essential for catalytic activity, and a catalytic mechanism has been proposed.

[0315] Crystal structures of bacterial xylulokinase in the apo form and bound to D-xylulose have been determined at 2.7 and 2.1 Å resolution, respectively.

[0316] In particular embodiments, the enzyme converts D-xylulose to D-xylulose-5-phosphate. In some embodiments, the D-xylulose 5-kinase is from Escherichia coli. In some embodiments, the D-xylulose 5-kinase is encoded by the xylB gene. In some embodiments, the D-xylulose 5-kinase is from Saccharomyces cerevisiae. In some embodiments the D-xylulose 5-kinase is encoded by the XKS1 gene. In some embodiments, the D-xylulose 5-kinase is from Pichia shpais. In some embodiments the D-xylulose 5-kinase is encoded by the XYL3 gene.

[0317] In some embodiments, the D-xylulose 5-kinase is encoded by an amino acid sequence having at least 70% sequence identity to xylB from E. coli. In a further embodiment, the D-xylulose 5-kinase is encoded by an amino acid sequence having at least 80% sequence identity to xylB from E. coli. In yet a further embodiment, the D-xylulose 5-kinase is encoded by an amino acid sequence having at least 90% sequence identity to xylB from E. coli. In other embodiments, the D-xylulose 5-kinase is xylB from E. coli.

[0318] In one embodiment, the D-xylulose 5-kinase is encoded by one or more nucleic acid molecules obtained from E. coli. In some embodiments, the one or more nucleic acid molecules encoding the D-xylulose 5-kinase is xylB, or homolog thereof. In another embodiment, the one or more nucleic acid molecules encoding the D-xylulose 5-kinase comprises an amino acid sequence set forth in SEQ ID NO: 146. In a further embodiment, the one or more nucleic acid molecules encoding the D-xylulose 5-kinase is encoded by a nucleic acid sequence set forth in SEQ ID NO: 145.

[0319] Xylose dehydrogenase (EC 1.1.1.175 or EC 1.1.1.179)

[0320] The present disclosure describes enzymes that can catalyze the following reactions:

[0321] aldehydo-D-xylose+NAD++H₂O→D-xylonate+NADH+2 H+

[0322] α-D-xylopyranose+NAD+⇄D-xylonolactone+NADH+H+ (reversibility unspecified, EC 1.1.1.175)

[0323] Xylose dehydrogenase may also be known as D-xylose dehydrogenase, D-xylose 1-dehydrogenase, (NAD+)-linked D-xylose dehydrogenase, NAD+-D-xylose dehydrogenase, D-xylose:NAD+1-oxidoreductase

[0324] D-xylose dehydrogenase catalyzes the NAD+-dependent oxidation of D-xylose to D-xylonolactone. This is the first reaction in the oxidative, non-phosphorylative pathway for the degradation of D-xylose in Caulobacter crescentus. This pathway is similar to the pathway for L-arabinose degradation in Azospirillum brasilense. The amino acid sequence of the C. crescentus enzyme is unrelated to that of xylose dehydrogenase from the archaeon Haloarcula marismortui, or the L-arabinose 1-dehydrogenase of Azospirillum brasilense.

[0325] D-xylose is the preferred substrate for recombinant D-xylose dehydrogenase from Caulobacter crescentus. The enzyme can use L-arabinose, but it is a poorer substrate. The Km for L-arabinose is 166 mM. Other substrates such as D-arabinose, L-xylose, D-ribose, D-galactose, D-glucose and D-glucose-6-phosphate showed little or no activity in the assay, as measured by NADH production. C. crescentus D-xylose dehydrogenase can convert D-xylose to D-xylonate directly.

[0326] Partially purified, native D-xylose dehydrogenase from C. crescentus had a Km of 70 μM for D-xylose. This value was lower than the Km of 760 μM for the recombinant, His-tagged enzyme.

[0327] In some embodiments, the D-xylose dehydrogenase is from the halophilic archaeon Haloferax volcanii. The Haloferax volcanii D-xylose dehydrogenase catalyzes the first reaction in the oxidative xylose degradation pathway of the halophilic archaeon Haloferax volcanii. The H. volcanii D-xylose dehydrogenase shows 59% amino acid sequence identity to a functionally characterized xylose dehydrogenase from Haloarcula marismortui and 56% identity to an ortholog in Halorubrum lacusprofundi, but is only 11% identical to the bacterial NAD+-dependent xylose dehydrogenase from Caulobacter crescentus CB15.

[0328] In particular embodiments, the enzyme converts D-xylose to D-xylonolactone. In one embodiment, the xylose dehydrogenase is encoded by one or more nucleic acid molecules obtained from a microorganism selected from the group consisting of Caulobacter sp., Haloarcula sp., Haloferax sp., Halorubrum sp. and Trichoderma sp. In another embodiment, the xylose dehydrogenase is encoded by one or more nucleic acid molecules obtained from a microorganism selected from the group consisting of Caulobacter crescentus, Haloarcula marismortui, Haloferax volcanii, Halorubrum lacusprofundi and Trichoderma reesei. In some embodiments, the one or more nucleic acid molecules encoding the xylose dehydrogenase is selected from xylB, xdh1 (HVO_B0028) and/or xyd1, or homolog thereof. In a further embodiment, the one or more nucleic acid molecules encoding the xylose dehydrogenase comprises an amino acid sequence selected from the group consisting of SEQ ID NOs: 61, 63 and 65. In yet another embodiment, the one or more nucleic acid molecules encoding the xylose dehydrogenase is encoded by a nucleic acid sequence selected from the group consisting of SEQ ID NOs: 59, 60, 62 and 64.

### Xylonolactonase (3.1.1.68)

[0329] The present disclosure describes enzymes that can catalyze the following reaction:

[0330] D-xylono-1,4-lactone+H₂O⇄D-xylonate

[0331] This enzyme belongs to the family of hydrolases, specifically those acting on carboxylic ester bonds. This enzyme participates in pentose and glucuronate interconversions.

[0332] Xylonolactonase may also be known as D-xylonolactonase, xylono-1,4-lactonase, xylono-gamma-lactonase or D-xylono-1,4-lactonelactonohydrolase.

[0333] In particular embodiments, the enzyme converts D-xylonolactone to D-xylonate. In one embodiment, the xylonolactonase is encoded by one or more nucleic acid molecules obtained from a microorganism selected from Caulobacter sp. and Haloferax sp. In another embodiment, the xylonolactonase is encoded by one or more nucleic acid molecules obtained from a microorganism selected from the group consisting of Caulobacter crescentus, Haloferax volcanii and Haloferax gibbonsii. In some embodiments, the one or more nucleic acid molecules encoding the xylonolactonase is xylC, or homolog thereof. In a further embodiment, the one or more nucleic acid molecules encoding the xylonolactonase comprises an amino acid sequence set forth in SEQ ID NO: 67. In yet another embodiment, the one or more nucleic acid molecules encoding the xylonolactonase is encoded by a nucleic acid sequence set forth in SEQ ID NO: 66.

### Xylonate Dehydratase (EC 4.2.1.82)

[0334] The present disclosure describes enzymes that can catalyze the following reaction:

[0335] D-xylonate⇄2-keto-3-deoxy-D-xylonate+H₂O

[0336] This enzyme belongs to the family of lyases, specifically the hydro-lyases, which cleave carbon-oxygen bonds. This enzyme participates in pentose and glucuronate interconversions.

[0337] Xylonate dehydratase may also be known as D-xylonate hydro-lyase, D-xylo-aldonate dehydratase or D-xylonate dehydratase.

[0338] In particular embodiments, the enzyme converts D-xylonate to 2-keto-3-deoxy-D-xylonate. In one embodiment, the xylonate dehydratase is encoded by one or more nucleic acid molecules obtained from a microorganism selected from the group consisting of Caulobacter sp., Sulfolobus sp. and E. coli. In another embodiment, the xylonate dehydratase is encoded by one or more nucleic acid molecules obtained from a microorganism selected from the group consisting of Caulobacter crescentus, Sulfolobus solfataricus and E. coli. In some embodiments, the one or more nucleic acid molecules encoding the xylonate dehydratase is selected from xylD, yjhG and/or yagF, or homolog thereof. In a further embodiment, the one or more nucleic acid molecules encoding the xylonate dehydratase comprises an amino acid sequence selected from the group consisting of SEQ ID NOs: 69, 72 and 75. In yet another embodiment, the one or more nucleic acid molecules encoding the xylonate dehydratase is encoded by a nucleic acid sequence selected from the group consisting of SEQ ID NOs: 68, 70, 71, 73 and 74.

### 2-keto-3-deoxy-D-pentonate aldolase (4.1.2.28)

[0339] The present disclosure describes enzymes that can catalyze the following reaction:

[0340] 2-dehydro-3-deoxy-D-pentonate⇄glycolaldehyde+pyruvate (reversibility unspecified)

[0341] This enzyme belongs to the family of lyases, specifically the aldehyde-lyases, which cleave carbon-carbon bonds. This enzyme participates in pentose and glucuronate interconversions.

[0342] 2-keto-3-deoxy-D-pentonate aldolase may also be known as 2-dehydro-3-deoxy-D-pentonate glycolaldehyde-lyase (pyruvate-forming), 2-dehydro-3-deoxy-D-pentonate aldolase, 3-deoxy-D-pentulosonic acid aldolase, and 2-dehydro-3-deoxy-D-pentonate glycolaldehyde-lyase.

[0343] YjhH appears to be a 2-dehydro-3-deoxy-D-pentonate aldolase. Genetic evidence suggests that YagE may also function as a 2-dehydro-3-deoxy-D-pentonate aldolase. yagE is part of the prophage CP4-6.

[0344] A yjhH yagE double mutant cannot use D-xylonate as the sole source of carbon, and crude cell extracts do not contain 2-dehydro-3-deoxy-D-pentonate aldolase activity. Both phenotypes are complemented by providing yjhH on a plasmid.

[0345] ArcA appears to activate yjhH gene expression under anaerobiosis. Two putative ArcA binding sites were identified 211 and 597 bp upstream of this gene, but no promoter upstream of it has been identified.

[0346] The crystal structure of YagE suggests that the protein is a homotetramer. Co-crystal structures of YagE in the presence of pyruvate and 2-keto-3-deoxygalactonate have been solved.

[0347] In particular embodiments, the enzyme converts 2-keto-3-deoxy-xylonate to glycolaldehyde and pyruvate. In one embodiment, the 2-keto-3-deoxy-D-pentonate aldolase is encoded by one or more nucleic acid molecules obtained from a microorganism selected from Pseudomonas sp. and E. coli. In another embodiment, the 2-keto-3-deoxy-D-pentonate aldolase is encoded by one or more nucleic acid molecules obtained from E. coli. In some embodiments, the one or more nucleic acid molecules encoding the 2-keto-3-deoxy-D-pentonate aldolase is selected from yjhH and/or yagE, or homolog thereof. In a further embodiment, the one or more nucleic acid molecules encoding the 2-keto-3-deoxy-D-pentonate aldolase comprises an amino acid sequence selected from the group consisting of SEQ ID NOs: 78 and 81. In yet another embodiment, the one or more nucleic acid molecules encoding the 2-keto-3-deoxy-D-pentonate aldolase is encoded by a nucleic acid sequence selected from the group consisting of SEQ ID NOs: 76, 77, 79 and 80.

### Glycolaldehyde Dehydrogenase (1.2.1.21)

[0348] The present disclosure describes enzymes that can catalyze the following reaction:

[0349] glycolaldehyde+NAD⁺+H₂O⇄glycolate+NADH+2 H⁺

[0350] This enzyme belongs to the family of oxidoreductases, specifically those acting on the aldehyde or oxo group of donor with NAD+ or NADP+ as acceptor. This enzyme participates in glyoxylate and dicarboxylate metabolism.

[0351] Glycolaldehyde dehydrogenase may also be known as glycolaldehyde:NAD+ oxidoreductase or glycol aldehyde dehydrogenase.

[0352] In E. coli aldehyde dehydrogenase A (AldA) is an enzyme of relatively broad substrate specificity for small a-hydroxyaldehyde substrates. It is thus utilized in several metabolic pathways.

[0353] L-fucose and L-rhamnose are metabolized through parallel pathways which converge after their corresponding aldolase reactions yielding the same products: dihydoxy-acetone phosphate and L-lactaldehyde. Aerobically, aldehyde dehydrogenase A oxidizes L-lactaldehyde to L-lactate.

[0354] In parallel pathways utilizing the same enzymes, D-arabinose and L-xylose can be metabolized to dihydoxy-acetone phosphate and glycolaldehyde, which is oxidized to glycolate by aldehyde dehydrogenase A.

[0355] Crystal structures of the enzyme alone and in ternary and binary complexes have been solved.

[0356] Aldehyde dehydrogenase A is only present under aerobic conditions and is most highly induced by the presence of fucose, rhamnose or glutamate. The enzyme is inhibited by NADH, which may act as a switch to shift from oxidation of lactaldehyde to its reduction by propanediol oxidoreductase. AldA is upregulated during short-term adaptation to glucose limitation.

[0357] Based on sequence similarity, AldA was predicted to be a succinate-semialdehyde dehydrogenase.

[0358] Regulation of aldA expression has been investigated. The gene is regulated by catabolite repression, repression under anaerobic conditions via ArcA, and induction by the carbon source.

[0359] In particular embodiments, the enzyme converts glycolaldehyde to glycolate. In some embodiments, the glycolaldehyde dehydrogenase is from Escherichia coli. In some embodiments, the glycolaldehyde dehydrogenase is encoded by the aldA gene.

[0360] In some embodiments, a recombinant microorganism producing MEG, or optionally, MEG and one or more co-product, comprises a deletion, insertion, or loss of function mutation in a gene encoding a glycolaldehyde dehydrogenase to prevent the production of glycolic acid from glycolaldehyde and instead shunt the reaction toward conversion of glycolaldehyde to MEG. In some embodiments, the deletion, disruption, mutation, and/or reduction in the activity of a glycolaldehyde dehydrogenase that catalyzes the conversion of glycolaldehyde to glycolic acid is partial, wherein an amount of glycolic acid is still produced.

[0361] In other embodiments, a recombinant microorganism producing glycolic acid comprises or expresses at least one nucleic acid molecule encoding a glycolaldehyde dehydrogenase.

### Lactate Dehydrogenase (1.1.1.28)

[0362] The present disclosure describes enzymes that can catalyze the following reaction:

[0363] (R)-lactate+NAD+←pyruvate+NADH+H+

[0364] Lactate dehydrogenase (LDH) is an enzyme found in nearly all living cells such as in animals, plants and prokaryotes. LDH catalyzes the conversion of lactate to pyruvic acid and back, as it converts NADH to NAD+ and back. A dehydrogenase is an enzyme that transfers a hydride from one molecule to another.

[0365] LDH exist in four distinct enzyme classes. The most common one is NAD(P)-dependent L-lactate dehydrogenase. Other LDHs act on D-lactate and/or are dependent on cytochrome c: D-lactate dehydrogenase (cytochrome) and L-lactate dehydrogenase (cytochrome).

[0366] LDH has been of medical significance because it is found extensively in body tissues, such as blood cells and heart muscle. Because it is released during tissue damage, it is a marker of common injuries and disease such as heart failure.

[0367] Lactate dehydrogenase may also be known as lactic acid dehydrogenase, (R)-lactate:NAD+ oxidoreductase or D-lactate dehydrogenase—fermentative.

[0368] In E. coli, lactate dehydrogenase (LdhA) is a soluble NAD-linked lactate dehydrogenase (LDH) that is specific for the production of D-lactate. LdhA is a homotetramer and shows positive homotropic cooperativity under higher pH conditions.

[0369] E. coli contains two other lactate dehydrogenases: D-lactate dehydrogenase and L-lactate dehydrogenase. Both are membrane-associated flavoproteins required for aerobic growth on lactate.

[0370] LdhA is present under aerobic conditions but is induced when E. coli is grown on a variety of sugars under anaerobic conditions at acidic pH. Unlike most of the genes involved in anaerobic respiration, ldhA is not activated by Fnr; rather the ArcAB system and several genes involved in the control of carbohydrate metabolism (csrAB and mlc) appear to regulate expression. The expression of ldhA is negatively affected by the transcriptional regulator ArcA. ldhA belongs to the 632 regulon.

[0371] The ldhA gene is a frequent target for mutations in metabolic engineering, most often to eliminate production of undesirable fermentation side products, but also to specifically produce D-lactate.

[0372] In particular embodiments, the enzyme converts pyruvate to lactate. In some embodiments, the lactate dehydrogenase is from Escherichia coli. In some embodiments, the lactate dehydrogenase is encoded by the ldhA gene.

[0373] In some embodiments, a recombinant microorganism producing MEG or GA, or optionally, MEG or GA and one or more co-product, comprises a deletion, insertion, or loss of function mutation in a gene encoding a lactate dehydrogenase to prevent the production of lactate from pyruvate and instead shunt the reaction toward production of one or more co-products.

### Xylose Reductase or Aldose Reductase (EC 1.1.1.21)

[0374] The present disclosure describes enzymes that can catalyze the following reactions:

[0375] α-D-xylose+NADPH+H+⇄xylitol+NADP

[0376] an alditol+NAD(P)+⇄NAD(P)H+aldose

[0377] Aldose reductase may also be known as alditol:NAD(P)+ 1-oxidoreductase, polyol dehydrogenase or aldehyde reductase.

[0378] Aldose reductase is a cytosolic oxidoreductase that catalyzes the reduction of a variety of aldehydes and carbonyls, including monosaccharides.

[0379] Aldose reductase may be considered a prototypical enzyme of the aldo-keto reductase enzyme superfamily. The enzyme comprises 315 amino acid residues and folds into a β/α-barrel structural motif composed of eight parallel β strands. Adjacent strands are connected by eight peripheral α-helical segments running anti-parallel to the β sheet. The catalytic active site is situated in the barrel core. The NADPH cofactor is situated at the top of the β/α barrel, with the nicotinamide ring projecting down in the center of the barrel and pyrophosphate straddling the barrel lip.

[0380] The reaction mechanism of aldose reductase in the direction of aldehyde reduction follows a sequential ordered path where NADPH binds, followed by the substrate. Binding of NADPH induces a conformational change (Enzyme•NADPH->Enzyme*•NADPH) that involves hinge-like movement of a surface loop (residues 213-217) so as to cover a portion of the NADPH in a manner similar to that of a safety belt. The alcohol product is formed via a transfer of the pro-R hydride of NADPH to the face of the substrate's carbonyl carbon. Following release of the alcohol product, another conformational change occurs (E*•NAD(P)+->E•NAD(P)+) in order to release NADP+. Kinetic studies have shown that reorientation of this loop to permit release of NADP+ appears to represent the rate-limiting step in the direction of aldehyde reduction. As the rate of coenzyme release limits the catalytic rate, it can be seen that perturbation of interactions that stabilize coenzyme binding can have dramatic effects on the maximum velocity (Vmax).

[0381] D-xylose-fermenting Pichia stipitis and Candida shehatae were shown to produce one single aldose reductase (ALR) that is active both with NADPH and NADH. Other yeasts such as Pachysolen tannophilus and C. tropicalis synthesize multiple forms of ALR with different coenzyme specificities. The significant dual coenzyme specificity distinguishes the P. stipitis and the C. shehatae enzymes from most other ALRs so far isolated from mammalian or microbial sources. The yeast Candida tenuis CBS 4435 produces comparable NADH- and NADPH-linked aldehyde-reducing activities during growth on D-xylose.

[0382] In particular embodiments, the enzyme converts D-xylose to xylitol. In some embodiments, the xylose reductase or aldose reductase is encoded by one or more nucleic acid molecules obtained from a microorganism selected from the group consisting of Hypocrea sp., Scheffersomyces sp., Saccharomyces sp., Pachysolen sp., Pichia sp., Candida sp., Aspergillus sp., Neurospora sp., and Cryptococcus sp. In some embodiments, the xylose reductase or aldose reductase is encoded by one or more nucleic acid molecules obtained from a microorganism selected from the group consisting of Hypocrea jecorina, Scheffersomyces stipitis, Saccharomyces cerevisiae, Pachysolen tannophilus, Pichia stipitis, Pichia quercuum, Candida shehatae, Candida tenuis, Candida tropicalis, Aspergillus niger, Neurospora crassa and Cryptococcus lactativorus. In another embodiment, the one or more nucleic acid molecules encoding the xylose reductase or aldose reductase is xyl1 and/or GRE3 or homolog thereof. In some embodiments, the one or more nucleic acid molecules encoding the xylose reductase or aldose reductase comprises an amino acid sequence selected from the group consisting of SEQ ID NOs: 84 and 87. In some embodiments, the one or more nucleic acid molecules encoding the xylose reductase or aldose reductase is encoded by a nucleic acid sequence selected from the group consisting of SEQ ID NOs: 82, 83, 85 and 86.

### Xylitol Dehydrogenase (1.1.1.9)

[0383] The present disclosure describes enzymes that can catalyze the following reaction:

[0384] xylitol+NAD+⇄D-xylulose+NADH+H+

[0385] Xylitol dehydrogenase may also be known as D-xylulose reductase, NAD+-dependent xylitol dehydrogenase, erythritol dehydrogenase, 2,3-cis-polyol(DPN) dehydrogenase (C3-5), pentitol-DPN dehydrogenase, xylitol-2-dehydrogenase or xylitol:NAD+ 2-oxidoreductase (D-xylulose-forming).

[0386] Xylitol dehydrogenase (XDH) is one of several enzymes responsible for assimilating xylose into eukaryotic metabolism and is useful for fermentation of xylose contained in agricultural byproducts to produce ethanol. For efficient xylose utilization at high flux rates, cosubstrates should be recycled between the NAD+-specific XDH and the NADPH-preferring xylose reductase, another enzyme in the pathway.

[0387] In particular embodiments, the enzyme converts xylitol to D-xylulose. In one embodiment of any aspect disclosed above, the xylitol dehydrogenase is encoded by one or more nucleic acid molecules obtained from a microorganism selected from the group consisting of Scheffersomyces sp., Trichoderma sp., Pichia sp., Saccharomyces sp., Gluconobacter sp., Galactocandida sp., Neurospora sp., and Serratia sp. In another embodiment, the xylitol dehydrogenase is encoded by one or more nucleic acid molecules obtained from a microorganism selected from the group consisting of Scheffersomyces stipitis, Trichoderma reesei, Pichia stipitis, Saccharomyces cerevisiae, Gluconobacter oxydans, Galactocandida mastotermitis, Neurospora crassa and Serratia marcescens. In another embodiment, the one or more nucleic acid molecules encoding the xylitol dehydrogenase is xyl2 and/or xdh1, or homolog thereof. In some embodiments, the one or more nucleic acid molecules encoding the xylitol dehydrogenase comprises an amino acid sequence selected from the group consisting of SEQ ID NOs: 90 and 92. In some embodiments, the one or more nucleic acid molecule encoding the xylitol dehydrogenase is encoded by a nucleic acid sequence selected from the group consisting of SEQ ID NOs: 88, 89 and 91. In another embodiment, the enzyme converts D-xylulose to xylitol. In another embodiment, the enzyme has high activity for the conversion of D-xylulose to xylitol and preferably low activity or no activity for the reverse reaction, i.e. for the conversion of xylitol to D-xylulose. In another embodiment, this is achieved through enzyme engineering.

### Soluble Pyridine Nucleotide Transhydrogenase (EC 1.6.1.1.)

[0388] The present disclosure describes enzymes that can catalyze the following reaction:

[0389] NADH+NADP+⇄NAD++NADPH

[0390] Soluble pyridine nucleotide transhydrogenase may also be known as NAD(P)+ transhydrogenase (B-specific), STH, pyridine nucleotide transhydrogenase, or transhydrogenase.

[0391] E. coli contains both a soluble and a membrane-bound pyridine nucleotide transhydrogenase. The soluble pyridine nucleotide transhydrogenase is the sthA or udhA gene product; its primary physiological role appears to be the reoxidation of NADPH. The membrane-bound proton-translocating transhydrogenase is the pntAB gene product; PntAB is a major source of NADPH.

[0392] UdhA contains noncovalently bound FAD and is present in a form consisting of seven or eight monomers.

[0393] Moderate overexpression of UdhA (SthA) allows an increased maximal growth rate of a phosphoglucose isomerase mutant, and a pgi sthA double mutant is not viable. These phenotypes may be due to the ability of UdhA to restore the cellular redox balance under conditions of excess NADPH formation. Mutations in sthA appear during adaptation of a pgi mutant strain to growth on glucose minimal medium.

[0394] Transcription of sthA is downregulated by growth on glycerol.

[0395] In some embodiments, expression of a transhydrogenase can increase activity of a NADPH-dependent alcohol dehydrogenase, leading to improved acetone to 2-propanol conversion. In one embodiment, the soluble pyridine nucleotide transhydrogenase is encoded by one or more nucleic acid molecules obtained from E. coli. In another embodiment, the one or more nucleic acid molecules encoding the soluble pyridine nucleotide transhydrogenase is udhA, or homolog thereof. In some embodiments, the one or more nucleic acid molecules encoding the soluble pyridine nucleotide transhydrogenase comprises an amino acid sequence set forth in SEQ ID NO: 142. In some embodiments, the one or more nucleic acid molecules encoding the soluble pyridine nucleotide transhydrogenase is encoded by a nucleic acid sequence set forth in SEQ ID NO: 141.

### Hydroxymethylglutaryl-CoA Synthase (EC 2.3.3.-)

[0396] The present disclosure describes enzymes that can catalyze the following reaction:

[0397] acetoacetyl-CoA+acetyl-CoA+H₂O↔(S)-3-hydroxy-3-methylglutaryl-CoA+coenzyme A+H⁺

[0398] Hydroxymethylglutaryl-CoA synthase may also be known as (S)-3-hydroxy-3-methylglutaryl-CoA acetoacetyl-CoA-lyase (CoA-acetylating), 3-hydroxy-3-methylglutaryl CoA synthetase, 3-hydroxy-3-methylglutaryl coenzyme A synthase, 3-hydroxy-3-methylglutaryl coenzyme A synthetase, 3-hydroxy-3-methylglutaryl-CoA synthase, 3-hydroxy-3-methylglutaryl-coenzyme A synthase, β-hydroxy-β-methylglutaryl-CoA synthase, HMG-CoA synthase, acetoacetyl coenzyme A transacetase, hydroxymethylglutaryl coenzyme A synthase, and hydroxymethylglutaryl coenzyme A-condensing enzyme.

[0399] Hydroxymethylglutaryl-CoA synthase catalyzes the condensation of acetyl-CoA with acetoacetyl-CoA to form (S)-3-hydroxy-3-methylglutaryl-CoA, an early stage in the synthesis of (R)-mevalonate, a precursor of cholesterol.

[0400] The enzyme catalyzes a complex reaction that can be divided into four steps. The first step involves the formation of an enzyme acetyl-CoA binary complex, followed by the transfer of the acetyl group from the CoA thioester to a cysteine residue on the enzyme, forming a thioester acyl-enzyme intermediate. In the next step the now reduced CoA dissociates, and the second substrate, acetoacetyl-CoA, binds the enzyme. The third step involves the formation of a carbanion by removal of a proton from the methyl of the acetylcysteine. The activated acetylcysteine then undergoes a Claisen-like condensation with the γ-carbon of the acetoacetyl-CoA ligand, which forms the HMG-CoA while retaining the thioester bond to the enzyme. The last step comprises the hydrolysis of this bond, resulting in free HMG-CoA.

[0401] The HMGCS1 gene from Homo sapiens has been cloned and sequenced (Russ A P et al. (1992) Amplification and direct sequencing of a cDNA encoding human cytosolic 3-hydroxy-3-methylglutaryl-coenzyme A synthase. Biochim Biophys Acta 1132(3): 329-31). The gene was expressed in Escherichia coli, and the recombinant protein was purified and characterized (Rokosz L L et al. (1994) Human cytoplasmic 3-hydroxy-3-methylglutaryl coenzyme A synthase: expression, purification, and characterization of recombinant wild-type and Cys129 mutant enzymes. Arch Biochem Biophys 312(1): 1-13). The enzyme is a homodimer of 120 kDa. Catalysis proceeds by formation of a covalent acetyl-enzyme intermediate. Kinetic data suggest that the two substrates (acetyl-CoA and acetoacetyl-CoA) compete for binding to the same site.

[0402] In one embodiment, the hydroxymethylglutaryl-CoA synthase can have a 3-hydroxyisovalerate (3HIV) synthase activity and can catalyze the following reaction:

[0403] acetone+acetyl-CoA+H2O↔3-hydroxyisovalerate

[0404] In one embodiment, the 3HIV synthase is encoded by one or more nucleic acid molecules obtained from a microorganism selected from Mus sp., Saccharomyces sp., Lactobacillus sp. and Polaromonas sp. In another embodiment, the 3HIV synthase is encoded by one or more nucleic acid molecules obtained from a microorganism selected from Mus musculus, Saccharomyces cerevisiae, Lactobacillus crispatus and Polaromonas naphthalenivorans. In some embodiments, the one or more nucleic acid molecules encoding the 3HIV synthase is selected from Hmgcs1, ERG13, PksG and/or Pnap_0477, or homolog thereof. In a further embodiment, the one or more nucleic acid molecules encoding the 3HIV synthase comprises an amino acid sequence selected from the group consisting of SEQ ID NOs: 105, 107, 109 and 111. In yet another embodiment, the one or more nucleic acid molecules encoding the 3HIV synthase is encoded by a nucleic acid sequence selected from the group consisting of SEQ ID NOs: 104, 106, 108 and 110. In some embodiments, the one or more nucleic acid molecules encoding the hydroxymethylglutaryl-CoA synthase is hmgS, or homolog thereof. In a further embodiment, the one or more nucleic acid molecules encoding the hydroxymethylglutaryl-CoA synthase comprises an amino acid sequence set forth in SEQ ID NO: 123. In yet another embodiment, the one or more nucleic acid molecules encoding the hydroxymethylglutaryl-CoA synthase is encoded by a nucleic acid sequence set forth in SEQ ID NO: 122.

### Methylglutaconyl-CoA Hydratase (EC 4.2.1.18)

[0405] The present disclosure describes enzymes that can catalyze the following reaction:

[0406] (S)-3-hydroxy-3-methylglutaryl-CoA↔trans-3-methylglutaconyl-CoA+H₂O

[0407] This enzyme catalyzes the syn-hydration of 3-methylglutaconyl-CoA to (S)-3-hydroxy-3-methylglutaryl-CoA in the leucine degradation pathway. The bacterial enzyme has been characterized in Pseudomonas putida. It differs from the mammalian enzyme in having only one glutamyl residue in its active site rather than two, resulting in a different reaction mechanism. These enzymes are members of the crotonase superfamily (Wong B J and Gerlt J A (2004) Evolution of function in the crotonase superfamily: (3S)-methylglutaconyl-CoA hydratase from Pseudomonas putida. Biochemistry 43(16): 4646-4654) and reviewed in (Hamed R B et al. (2008) Mechanisms and structures of crotonase superfamily enzymes—how nature controls enolate and oxyanion reactivity. Cell Mol Life Sci 65(16): 2507-2527).

[0408] Recombinant enzyme was expressed in Escherichia coli, purified and characterized. The apparent molecular mass of the 10-His-tagged polypeptide was determined to be 32.251 kDa by ESI-MS. The 10-His-tag was subsequently removed before characterization of the enzyme (Wong and Gerlt 2004).

[0409] In one embodiment, the methylglutaconyl-CoA hydratase is encoded by one or more nucleic acid molecules obtained from Pseudomonas sp. In another embodiment, the methylglutaconyl-CoA hydratase is encoded by one or more nucleic acid molecules obtained from Pseudomonas putida. In some embodiments, the one or more nucleic acid molecules encoding the methylglutaconyl-CoA hydratase is liuC, or homolog thereof. In a further embodiment, the one or more nucleic acid molecules encoding the methylglutaconyl-CoA hydratase comprises an amino acid sequence set forth in SEQ ID NO: 125. In yet another embodiment, the one or more nucleic acid molecules encoding the methylglutaconyl-CoA hydratase is encoded by a nucleic acid sequence set forth in SEQ ID NO: 124.

### Methylcrotonyl-CoA Carboxylase (EC 6.4.1.4)

[0410] The present disclosure describes enzymes that can catalyze the following reaction:

[0411] ADP+phosphate+H⁺+3-methylglutaconyl-CoA↔ATP+3-methylcrotonoyl-CoA+HCO₃⁻

[0412] The enzyme activity is associated with the 3-methylcrotonyl-CoA carboxylase complex. This enzyme is a biotin-containing, biotin-dependent carboxylase involved in the L-leucine (and isovalerate) degradation pathway of Pseudomonas aeruginosa PAO1. This pathway is also the last phase of the acyclic terpene utilization pathway (citronellol degradation and cis-genanyl-CoA degradation pathways). The enzyme is not expressed in citronellol or citronellate grown cells, but is expressed in isovalerate grown cells. Genes liuB and liuD encode the two subunits of 3-methylcrotonyl-CoA carboxylase. The subunits are encoded in the liuRABCDE gene cluster of this organism (Hoschle B et al. (2005) Methylcrotonyl-CoA and geranyl-CoA carboxylases are involved in leucine/isovalerate utilization (Liu) and acyclic terpene utilization (Atu), and are encoded by liuB/liuD and atuC/atuF, in Pseudomonas aeruginosa. Microbiology 151(Pt 11): 3649-3656; Forster-Fromme K and Jendrossek D (2010). Catabolism of citronellol and related acyclic terpenoids in pseudomonads. Appl Microbiol Biotechnol 87(3): 859-869).

[0413] The enzyme was purified from cell extracts by avidin-affinity chromatography and the SDS-gel-isolated subunits were subjected to trypsin fingerprint analysis and ESI-MS which allowed identification of their corresponding genes (Hoschle et al. 2005).

[0414] The 3-methylcrotonyl-CoA carboxylase of Pseudomonas citronellolis was characterized in earlier work (Hector M L and Fall R R (1976) Multiple acyl-coenzyme A carboxylases in Pseudomonas citronellolis. Biochemistry 15(16): 3465-3472; Fall R R and Hector M L (1977) Acyl-coenzyme A carboxylases. Homologous 3-methylcrotonyl-CoA and geranyl-CoA carboxylases from Pseudomonas citronellolis. Biochemistry 16(18): 4000-4005; Fall R R (1981) 3-Methylcrotonyl-CoA and geranyl-CoA carboxylases from Pseudomonas citronellolis. Methods Enzymol 71 Pt C: 791-799).

[0415] In one embodiment, the methylcrotonyl-CoA carboxylase is encoded by one or more nucleic acid molecules obtained from Pseudomonas sp. In another embodiment, the methylcrotonyl-CoA carboxylase is encoded by one or more nucleic acid molecules obtained from Pseudomonas aeruginosa. In some embodiments, the one or more nucleic acid molecules encoding the methylcrotonyl-CoA carboxylase is selected from liuB and/or liuD, or homologs thereof. In a further embodiment, the one or more nucleic acid molecules encoding the methylcrotonyl-CoA carboxylase comprises an amino acid sequence selected from SEQ ID NOs: 127 and 129. In yet another embodiment, the one or more nucleic acid molecules encoding the methylcrotonyl-CoA carboxylase is encoded by a nucleic acid sequence selected from SEQ ID NOs: 126 and 128.

### Methylcrotonyl-CoA Hydratase (EC 4.2.1.17)

[0416] The present disclosure describes enzymes that can catalyze the following reaction:

[0417] trans-2(or 3)-enoyl-CoA+H₂O↔(3S)-3-hydroxyacyl-CoA

[0418] An exemplary enzyme is a 3-ketoacyl-CoA thiolase. It is involved in the degradation of fatty acids via the β-oxidation cycle. It has broad chain-length specificity for substrates although it exhibits its highest activity with medium-chain substrates. It is part of a multienzyme complex and is coded for by the fadA gene (Yang S Y et al (1990) Nucleotide sequence of the fadA gene. Primary structure of 3-ketoacyl-coenzyme A thiolase from Escherichia coli and the structural organization of the fadAB operon. J Biol Chem 265(18): 10424-10429;

[0419] 3-ketoacyl-CoA thiolase may also be known as acetyl-CoA C-acyltransferase, (3-ketothiolase, acetyl-CoA acyltransferase and acyl-CoA:acetyl-CoA C-acyltransferase.

[0420] Another exemplary enzyme is an enoyl-CoA hydratase. The alpha subunit has four enzymatic activities associated with it. It is part of a multienzyme complex. Two of the activities, enoyl-CoA hydratase (EC 4.2.1.17) and 3-OH acyl-CoA epimerase (EC 5.1.2.3) are carried out by the same N terminal active site (Yang S Y and Elzinga M (1993) Association of both enoyl coenzyme A hydratase and 3-hydroxyacyl coenzyme A epimerase with an active site in the amino-terminal domain of the multifunctional fatty acid oxidation protein from Escherichia coli. J Biol Chem 268(9): 6588-6592).

[0421] In one embodiment, the methylcrotonyl-CoA hydratase is a 3-ketoacyl-CoA thiolase. In another embodiment, the methylcrotonyl-CoA hydratase is encoded by one or more nucleic acid molecules obtained from Escherichia coli. In some embodiments, the one or more nucleic acid molecules encoding the methylcrotonyl-CoA hydratase is fadA, or homolog thereof. In a further embodiment, the one or more nucleic acid molecules encoding the methylcrotonyl-CoA hydratase comprises an amino acid sequence set forth in SEQ ID NO: 131. In yet another embodiment, the one or more nucleic acid molecules encoding the methylcrotonyl-CoA hydratase is encoded by a nucleic acid sequence set forth in SEQ ID NO: 130.

[0422] In one embodiment, the methylcrotonyl-CoA hydratase is an enoyl-CoA hydratase. In another embodiment, the methylcrotonyl-CoA hydratase is encoded by one or more nucleic acid molecules obtained from Escherichia coli. In some embodiments, the one or more nucleic acid molecules encoding the methylcrotonyl-CoA hydratase is fadB, or homolog thereof. In a further embodiment, the one or more nucleic acid molecules encoding the methylcrotonyl-CoA hydratase comprises an amino acid sequence set forth in SEQ ID NO: 133. In yet another embodiment, the one or more nucleic acid molecules encoding the methylcrotonyl-CoA hydratase is encoded by a nucleic acid sequence set forth in SEQ ID NO: 132.

3-hydroxy-isovaleryl-CoA thioesterase (EC 3.1.2.-)

[0423] The present disclosure describes enzymes that can catalyze the following reactions:

[0424] 3-hydroxyisovaleryl-CoA+H₂O↔3-hydroxyisovalerate+CoA

[0425] an acyl-CoA+H₂O→a carboxylate+coenzyme A+H⁺

[0426] An exemplary acyl-CoA thioesterase is TesB. Thioesterase II (TesB) is one of a number of thioesterases present in E. coli. The enzyme has relatively broad substrate specificity, cleaving medium- and long-chain acyl-CoA substrates; the best tested substrate was 3,5-tetradecadienoyl-CoA (Nie L et al. (2008) A novel paradigm of fatty acid beta-oxidation exemplified by the thioesterase-dependent partial degradation of conjugated linoleic acid that fully supports growth of Escherichia coli. Biochemistry 47(36): 9618-9626). Thioesterase II is one of the thioesterases supporting growth on oleate or conjugated linoleic acid as the sole source of carbon (Nie et al. 2008).

[0427] A crystal structure of the enzyme has been solved at 1.9 Å resolution. The D204 residue was predicted to be in the active site; its importance was confirmed by kinetic analysis of mutants (Li J et al. (2000) Crystal structure of the Escherichia coli thioesterase II, a homolog of the human Nef binding enzyme. Nat Struct Biol 7(7): 555-559).

[0428] Strains either lacking or overproducing tesB have no obvious defect (Narasimhan M L et al. (1986) Genetic and biochemical characterization of an Escherichia coli K-12 mutant deficient in acyl-coenzyme A thioesterase II. J Bacteriol 165(3): 911-917; Naggert J et al. (1991) Cloning, sequencing, and characterization of Escherichia coli thioesterase II. J Biol Chem 266(17): 11044-11050). Overproduction of TesB relieves inhibition of fatty acid synthesis by long-chain acyl-ACP molecules that accumulate upon glycerol starvation (Jiang P and Cronan J E (1994) Inhibition of fatty acid synthesis in Escherichia coli in the absence of phospholipid synthesis and release of inhibition by thioesterase action. J Bacteriol 176(10): 2814-2821).

[0429] In one embodiment, the 3-hydroxy-isovaleryl-CoA thioesterase is encoded by one or more nucleic acid molecules obtained from E. coli. In some embodiments, the one or more nucleic acid molecules encoding the 3-hydroxy-isovaleryl-CoA thioesterase is tesB, or homolog thereof. In a further embodiment, the one or more nucleic acid molecules encoding the 3-hydroxy-isovaleryl-CoA thioesterase comprises an amino acid sequence set forth in SEQ ID NO: 135. In yet another embodiment, the one or more nucleic acid molecules encoding the 3-hydroxy-isovaleryl-CoA thioesterase is encoded by a nucleic acid sequence set forth in SEQ ID NO: 134.

### Mevalonate-3-Kinase (EC 2.7.1.-)

[0430] The present disclosure describes enzymes that can catalyze the following reaction:

[0431] 3-hydroxyisovalerate+ATP⇄ADP+H(+)+3-phosphonoxyisovalerate

[0432] (R)-mevalonate+ATP→(R)-mevalonate 3-phosphate+ADP+H+

[0433] Mevalonate-3-kinase may also be known as (R)-MVA 3-phosphotransferase or 3-hydroxyisovalerate (3HIV) kinase.

[0434] The subunit structure of this enzyme from Thermoplasma acidophilum has not been reported.

[0435] The mevalonate-3-kinase from the thermophilic archaeon Thermoplasma acidophilum is thought to participate in a variant of the mevalonate pathway found in archaea Azami Y et al. (2014) (R)-Mevalonate 3-Phosphate Is an Intermediate of the Mevalonate Pathway in Thermoplasma acidophilum. J Biol Chem 289(23): 15957-15967; Vinokur J M et al. (2014) Evidence of a Novel Mevalonate Pathway in Archaea. Biochemistry 53(25): 4161-4168).

[0436] Recombinant His-tagged enzyme was expressed in Escherichia coli, purified and characterized. Despite its homology with diphosphomevalonate decarboxylase, it showed no decarboxylase activity (Azami et al. 2014; Vinokur et al. 2014). The enzyme showed weak phosphomevalonate kinase activity, producing small amounts of (R)-mevalonate diphosphate (Azami et al. 2014). It had no mevalonate-5-kinase activity (Vinokur et al. 2014).

[0437] In one embodiment, the 3HIV kinase is encoded by one or more nucleic acid molecules obtained from a microorganism selected from the group consisting of Thermoplasma sp. and Picrophilus sp. In another embodiment, the 3HIV kinase is encoded by one or more nucleic acid molecules obtained from a microorganism selected from the group consisting of Thermoplasma acidophilum and Picrophilus torridus. In some embodiments, the one or more nucleic acid molecules encoding the 3HIV kinase is TA1305 and/or PTO1356, or homolog thereof. In some embodiments, the TA1305 comprises a L200E mutation. In a further embodiment, the one or more nucleic acid molecules encoding the 3HIV-kinase comprises an amino acid sequence selected from the group consisting of SEQ ID NOs: 113, 115 and 117. In yet another embodiment, the one or more nucleic acid molecules encoding the 3HIV kinase is encoded by a nucleic acid sequence selected from the group consisting of SEQ ID NOs: 112, 114 and 116.

### Mevalonate Diphosphate Decarboxylase (EC 4.1.1.-)

[0438] The present disclosure describes enzymes that can catalyze the following reactions:

[0439] (R)-mevalonate diphosphate+ATP→isopentenyl diphosphate+CO₂+ADP+phosphate

[0440] 3-phosphonoxyisovalerate→CO₂+isobutene

[0441] 3-hydroxyisovalerate→CO₂+isobutene

[0442] Mevalonate diphosphate decarboxylase may also be known as pyrophosphomevalonate decarboxylase, mevalonate-5-pyrophosphate decarboxylase, pyrophosphomevalonic acid decarboxylase, 5-pyrophosphomevalonate decarboxylase, mevalonate 5-diphosphate decarboxylase, and ATP:(R)-5-diphosphomevalonate carboxy-lyase (dehydrating), 3-phosphonoxyisovalerate decarboxylase, 3-hydroxyisovalerate-3-phosphate decarboxylase, 3HIV-3-phosphate decarboxylase, 3-hydroxyisovalerate decarboxylase and 3HIV decarboxylase.

[0443] This enzyme converts mevalonate 5-diphosphate (MVAPP) to isopentenyl diphosphate (IPP) through ATP dependent decarboxylation. The two substrates of this enzyme are ATP and mevalonate 5-diphosphate, whereas its four products are ADP, phosphate, isopentenyl diphosphate, and CO₂.

[0444] Mevalonate diphosphate decarboxylase catalyzes the final step in the mevalonate pathway. The mevalonate pathway is responsible for the biosynthesis of isoprenoids from acetate. This pathway plays a key role in multiple cellular processes by synthesizing sterol isoprenoids, such as cholesterol, and non-sterol isoprenoids, such as dolichol, heme A, tRNA isopentenyltransferase, and ubiquinone. This enzyme belongs to the family of lyases, specifically the carboxy-lyases, which cleave carbon-carbon bonds.

[0445] Mevalonate diphosphate decarboxylase recognizes and binds two substrates: ATP and mevalonate 5-diphosphate. After binding, the enzyme performs three types of reactions that can be separated into two main stages. First, phosphorylation occurs. This creates a reactive intermediate, which in the second stage undergoes concerted dephosphorylation and decarboxylation.

[0446] In one embodiment, the enzyme that catalyzes the reaction 3-phosphonoxyisovalerate→CO₂+isobutene is a 3HIV-3-phosphate decarboxylase. In another embodiment, the 3HIV-3-phosphate decarboxylase is encoded by one or more nucleic acid molecules obtained from Streptococcus sp. In some embodiments, the microorganism is selected from Streptococcus mitis and/or Streptococcus gordonii. In some embodiments, the one or more nucleic acid molecules encoding the 3HIV-3-phosphate decarboxylase comprises an amino acid sequence selected from SEQ ID NOs: 119 and 121. In further embodiments, the one or more nucleic acid molecule encoding the 3HIV-3-phosphate decarboxylase is encoded by a nucleic acid sequence selected from SEQ ID NOs: 118 and 120.

[0447] In one embodiment, the enzyme that catalyzes the reaction 3-hydroxyisovalerate→CO₂+isobutene is a 3HIVdecarboxylase. In another embodiment, the 3HIV decarboxylase is encoded by one or more nucleic acid molecules obtained from a microorganism selected from the group consisting of Streptococcus sp., Thermoplasma sp. and Picrophilus sp. In another embodiment, the 3HIV decarboxylase is encoded by one or more nucleic acid molecules obtained from a microorganism selected from the group consisting of Streptococcus gordonii, Thermoplasma acidophilum and Picrophilus torridus. In some embodiments, the one or more nucleic acid molecules encoding the 3HIV decarboxylase comprises mvaD, TA1305 and/or PTO1356, or homolog thereof. In a further embodiment, the one or more nucleic acid molecules encoding the 3HIV decarboxylase comprises an amino acid sequence selected from the group consisting of SEQ ID NOs: 113, 117 and 121. In yet another embodiment, the one or more nucleic acid molecules encoding the 3HIV decarboxylase is encoded by a nucleic acid sequence selected from the group consisting of SEQ ID NOs: 112, 116 and 120.

### Transketolase (EC 2.2.1.1)

[0448] The present disclosure describes enzymes that can catalyze the following reactions:

[0449] D-erythrose 4-phosphate+D-xylulose 5-phosphate↔β-D-fructofuranose 6-phosphate+D-glyceraldehyde 3-phosphate

[0450] D-sedoheptulose 7-phosphate+D-glyceraldehyde 3-phosphate↔D-ribose 5-phosphate+D-xylulose 5-phosphate

[0451] Transketolase may also be known as glycolaldehydetransferase.

[0452] Transketolase catalyzes the reversible transfer of a ketol group between several donor and acceptor substrates. This key enzyme is a reversible link between glycolysis and the pentose phosphate pathway. The enzyme is involved in the catabolism of pentose sugars, the formation of D-ribose 5-phosphate, and the provision of D-erythrose 4-phosphate, a precursor of aromatic amino acids and PLP. E. coli contains two transketolase isozymes, TktA and TktB. TktA is responsible for the major transketolase activity.

[0453] In addition to its function in central carbon metabolism, transketolase appears to also have an unexpected role in chromosome structure; a tktA mutant affects chromosome topology.

[0454] Crystal structures of TktA in complex with donor and acceptor substrates have been solved, elucidating the reaction mechanism and mode of action of transketolase. A computational model of transketolase activity using a quantum mechanical/molecular mechanical method has been proposed, defining a new route for thiamine diphosphate activation. Transketolase I (TktA) is homodimeric. The urea denaturation pathways of wild type and active site mutants of TktA have been investigated, and the effects of temperature and pH on the structure, stability, aggregation and activity of transketolase have been determined. The acceptor specificity of TktA has been investigated.

[0455] TktA abundance is affected by the SOS inducer and mutagen 7-methoxy-2-nitronaphtho[2,1-b]furan (R7000). tktA is negatively regulated during entry into stationary phase. The effect by RpoS is likely indirect and might be mediated by an intermediate regulator that itself is directly regulated by RpoS.

[0456] The subunit structure of transketolase II (TktB) has not been explicitly determined. Overproduction of TktB suppresses the tktA mutant phenotype. Expression of tktB is increased in a tyrR mutant in the presence of phenylalanine. tktB expression is increased in stationary phase and positively regulated by RpoS and ppGpp. Levels of TktB protein increase during osmotic stress under aerobic, but not anaerobic growth conditions. TktB appears to be associated with the degradosome and may connect carbon metabolism to replication.

[0457] Expression of tktA and tktB is complementary, resulting in approximately constant levels of transketolase expression throughout growth.

[0458] In some embodiments, the transketolase is encoded by an amino acid sequence having at least 70% sequence identity to tktA from E. coli. In a further embodiment, the transketolase is encoded by an amino acid sequence having at least 80% sequence identity to tktA from E. coli. In yet a further embodiment, the transketolase is encoded by an amino acid sequence having at least 90% sequence identity to tktA from E. coli. In other embodiments, the transketolase is tktA from E. coli. In some embodiments, the transketolase is encoded by an amino acid sequence having at least 70% sequence identity to tktB from E. coli. In a further embodiment, the transketolase is encoded by an amino acid sequence having at least 80% sequence identity to tktB from E. coli. In yet a further embodiment, the transketolase is encoded by an amino acid sequence having at least 90% sequence identity to tktB from E. coli. In other embodiments, the transketolase is tktB from E. coli.

[0459] In some embodiments, the one or more nucleic acid molecules encoding the transketolase is tktA, or homolog thereof. In some embodiments, the one or more nucleic acid molecules encoding the transketolase is tktB, or homolog thereof. In another embodiment, the one or more nucleic acid molecules encoding the transketolase comprises an amino acid sequence selected from the group consisting of SEQ ID NOs: 148 and 150. In a further embodiment, the one or more nucleic acid molecule encoding the transketolase is encoded by a nucleic acid sequence selected from the group consisting of SEQ ID NOs: 147 and 149.

### Transaldolase (EC 2.2.1.2)

[0460] The present disclosure describes enzymes that can catalyze the following reaction:

[0461] D-sedoheptulose 7-phosphate+D-glyceraldehyde 3-phosphate↔β-D-fructofuranose 6-phosphate+D-erythrose 4-phosphate

[0462] Transaldolase may also be known as dihydroxyacetonetransferase; dihydroxyacetone synthase; formaldehyde transketolase.

[0463] Transaldolase B is an enzyme of the non-oxidative branch of the pentose phosphate pathway. Along with transketolase, transaldolase creates a reversible link between the pentose phosphate pathway and glycolysis. It catalyzes the interconversion of glyceraldehyde-3-phosphate and sedoheptulose-7-phosphate to fructose-6-phosphate and erythrose-4-phosphate. The reversibility of this reaction and carbon flux through the pentose phosphate pathway has been addressed both experimentally and theoretically.

[0464] There are two closely related transaldolases in E. coli, encoded by talA and talB. Only transaldolase B has been biochemically characterized. TalB is a dimer in solution and in the crystal structure. Mutation of the R300 residue leads to the formation of catalytically active monomers. Catalytically important active site residues have been identified by site-directed mutagenesis.

[0465] Crystal structures of transaldolase B have been determined, confirming the presence of a Schiff-base intermediate at the active site and leading to a proposed reaction mechanism.

[0466] A talB null mutant has no growth defect on minimal media with glucose as the carbon source.

[0467] In some embodiments, the transaldolase is encoded by an amino acid sequence having at least 70% sequence identity to talA or talB from E. coli. In a further embodiment, the transaldolase is encoded by an amino acid sequence having at least 80% sequence identity to talA or talB from E. coli. In yet a further embodiment, the transaldolase is encoded by an amino acid sequence having at least 90% sequence identity to talA or talB from E. coli. In other embodiments, the transaldolase is talA from E. coli. In yet further embodiments, the transaldolase is talB from E. coli.

[0468] In some embodiments, the one or more nucleic acid molecules encoding the transaldolase is talA, or homolog thereof. In some embodiments, the one or more nucleic acid molecules encoding the transaldolase is talB, or homolog thereof. In another embodiment, the one or more nucleic acid molecules encoding the transaldolase comprises an amino acid sequence selected from the group consisting of SEQ ID NOs: 152 and 154. In a further embodiment, the one or more nucleic acid molecule encoding the transaldolase is encoded by a nucleic acid sequence selected from the group consisting of SEQ ID NOs: 151 and 153.

### Ribose-5-Phosphate Isomerase (EC 5.3.1.6)

[0469] The present disclosure describes enzymes that can catalyze the following reaction:

[0470] D-ribose 5-phosphate↔D-ribulose 5-phosphate

[0471] Ribose-5-phosphate isomerase may also be known as phosphopentosisomerase; phosphoriboisomerase; ribose phosphate isomerase; 5-phosphoribose isomerase; D-ribose 5-phosphate isomerase; D-ribose-5-phosphate ketol-isomerase.

[0472] There are two physically and genetically distinct ribose-5-phosphate isomerases present in E. coli. The constitutive ribose-5-phosphate isomerase A (rpiA) normally accounts for more than 99% of the ribose-5-phosphate isomerase activity in the cell and functions in the pentose phosphate pathway (non-oxidative branch). The inducible ribose-5-phosphate isomerase B (rpiB) can substitute for rpiA's function if its expression is induced. There is no sequence similarity between the two enzymes.

[0473] Crystal structures of rpiA have been solved and active site residues and an acid-base catalytic mechanism were predicted. An rpiA mutant requires ribose for growth.

[0474] In some embodiments, the ribose-5-phosphate isomerase is encoded by an amino acid sequence having at least 70% sequence identity to rpiA or rpiB from E. coli. In a further embodiment, the ribose-5-phosphate isomerase is encoded by an amino acid sequence having at least 80% sequence identity to rpiA or rpiB from E. coli. In yet a further embodiment, the ribose-5-phosphate isomerase is encoded by an amino acid sequence having at least 90% sequence identity to rpiA or rpiB from E. coli. In other embodiments, the ribose-5-phosphate isomerase is rpiA or rpiB from E. coli.

[0475] In some embodiments, the one or more nucleic acid molecules encoding the ribose-5-phosphate isomerase is rpiA, or homolog thereof. In another embodiment, the one or more nucleic acid molecules encoding the ribose-5-phosphate isomerase comprise an amino acid sequence set forth in SEQ ID NO: 156. In a further embodiment, the one or more nucleic acid molecules encoding the ribose-5-phosphate isomerase is encoded by a nucleic acid sequence set forth in SEQ ID NO: 155. In some embodiments, the one or more nucleic acid molecules encoding the ribose-5-phosphate isomerase is rpiB, or homolog thereof. In another embodiment, the one or more nucleic acid molecules encode the ribose-5-phosphate comprising an amino acid sequence set forth in SEQ ID NO: 253. In a further embodiment, the one or more nucleic acid molecules encoding the ribose-5-phosphate isomerase is encoded by a nucleic acid sequence set forth in SEQ ID NO: 254.

### Ribulose-5-Phosphate 3-Epimerase (EC 5.1.3.1)

[0476] The present disclosure describes enzymes that can catalyze the following reaction:

[0477] D-ribulose 5-phosphate↔D-xylulose 5-phosphate

[0478] Ribulose-5-phosphate 3-epimerase may also be known as ribulose-phosphate 3-epimerase; phosphoribulose epimerase; erythrose-4-phosphate isomerase; phosphoketopentose 3-epimerase; xylulose phosphate 3-epimerase; phosphoketopentose epimerase; D-ribulose phosphate-3-epimerase; D-ribulose 5-phosphate epimerase; D-ribulose-5-P 3-epimerase; D-xylulose-5-phosphate 3-epimerase; pentose-5-phosphate 3-epimerase.

[0479] Ribulose-5-phosphate 3-epimerase (Rpe) is an enzyme of the non-oxidative branch of the pentose phosphate pathway.

[0480] Rpe requires ferrous iron for activity and is vulnerable to damage by H₂O₂ due to Fenton chemistry. Mn²⁺, Co²⁺ and Zn²⁺ can substitute for Fe²⁺ to varying degrees, and Rpe containing these alternative cations is not vulnerable to H₂O₂. Induction of the manganese transporter can protect Rpe from H₂O₂ damage.

[0481] In some embodiments, the ribulose-5-phosphate 3-epimerase is encoded by an amino acid sequence having at least 70% sequence identity to rpe from E. coli. In a further embodiment, the ribulose-5-phosphate 3-epimerase is encoded by an amino acid sequence having at least 80% sequence identity to rpe from E. coli. In yet a further embodiment, the ribulose-5-phosphate 3-epimerase is encoded by an amino acid sequence having at least 90% sequence identity to rpe from E. coli. In other embodiments, the ribulose-5-phosphate 3-epimerase is rpe from E. coli.

[0482] In some embodiments, the one or more nucleic acid molecules encoding the ribulose-5-phosphate 3-epimerase is rpe, or homolog thereof. In another embodiment, the one or more nucleic acid molecules encoding the ribulose-5-phosphate 3-epimerase comprise an amino acid sequence set forth in SEQ ID NO: 158. In a further embodiment, the one or more nucleic acid molecule encoding the ribulose-5-phosphate 3-epimerase is encoded by a nucleic acid sequence set forth in SEQ ID NO: 157.

### Fructose 6-Phosphate Phosphoketolase (Fpk, EC 4.1.2.22)

[0483] The present disclosure describes enzymes that can catalyze the following reaction:

[0484] D-fructose 6-phosphate+phosphate↔acetyl phosphate+D-erythrose 4-phosphate+H₂O

[0485] The phosphoketolase reaction by which β-D-fructofuranose 6-phosphate is converted to D-erythrose 4-phosphate and acetyl phosphate is one of the key reactions in the Bifidobacterium shunt. There is evidence for the existence of two distinct F6P-phosphoketolase enzymes in bifidobacteria. One is specific solely for F6P while the other is able to utilize both F6P and D-xylulose 5-phosphate (EC: 4.1.2.9), a reaction that appears later in the Bifidobacterium shunt. The enzyme encoded by the xfp gene, originally discovered in Bifidobacterium animalis lactis, is the dual-specificity enzyme. A phosphoketolase has also been purified from Leuconostoc nesenteroides (LEUM_1961).

[0486] In some embodiments, an enzyme having fructose-6-phosphate phosphoketolase activity is encoded by an amino acid sequence having at least 70% sequence identity, at least 80% sequence identity, or at least 90% sequence identity to an enzyme having fructose-6-phosphate phosphoketolase activity selected from the group consisting of Bifidobacterium dentium BDP_1006, Bifidobacterium lactis xfp, Lactobacillus paraplantarum xpkA and Bifidobacterium breve xfp. In a preferred embodiment, an enzyme having fructose-6-phosphate phosphoketolase activity is selected from the group consisting of Bifidobacterium dentium BDP 1006, Bifidobacterium lactis xfp, Lactobacillus paraplantarum xpkA and Bifidobacterium breve xfp. In another embodiment, the one or more nucleic acid molecules encoding the fructose-6-phosphate phosphoketolase comprise an amino acid sequence selected from the group consisting of SEQ ID NOs: 212, 214, 216 and 218. In a further embodiment, the one or more nucleic acid molecule encoding the fructose-6-phosphate phosphoketolase is encoded by a nucleic acid sequence selected from the group consisting of SEQ ID NOs: 211, 213, 215 and 217.

### Phosphate Acetyltransferase (EC 2.3.1.8)

[0487] The present disclosure describes enzymes that can catalyze the following reaction:

[0488] Acetyl-CoA+phosphate↔CoA+acetyl phosphate

[0489] Phosphate acetyltransferase (Pta) catalyzes the reversible conversion between acetyl-CoA and acetylphosphate, a step in the metabolism of acetate. Both pyruvate and phosphoenolpyruvate activate the enzyme in the direction of acetylphosphate synthesis and inhibit the enzyme in the direction of acetyl-CoA synthesis. The acetate formation from acetyl-CoA I pathway has been the target of metabolic engineering to reduce the flux to acetate and increase the production of commercially desired end products. It has also been studied using systems biology approaches such as metabolic modeling and flux balance analysis.

[0490] Pta is composed of three domains; only the C-terminal domain is required for phosphate acetyltransferase activity. The N-terminal domain is involved in stabilization of the native quarternary structure and metabolic regulation.

[0491] Pta may be able to utilize both acetyl-CoA and propionyl-CoA. An ack pta double mutant has reduced levels of propionate from L-threonine, suggesting that the enzyme is part of the anaerobic pathway metabolizing L-threonine to propionate. A pta mutant does not grow on acetate as the sole source of carbon. Both pta and pta ackA mutants are impaired in their ability to survive glucose starvation. The growth defect of a pta mutant appears to be due to perturbation of acetyl-CoA flux. pta mutants produce large amounts of lactate when grown on glucose as the carbon source under microaerophilic conditions. The effect of a pta mutation on metabolism, enzyme activity and gene expression has been thoroughly studied recently. pta and recBC mutants are synthetically growth inhibited.

[0492] Levels of Pta are decreased by growth on acetate and under low pH conditions. pta belongs to the CreBC regulon. FNR has a slightly positive effect on pta expression. The growth-rate dependent expression pattern of pta-ackA was measured.

[0493] The pta gene that encodes the enzyme has been cloned from Clostridium acetobutylicum, sequenced and expressed in Escherichia coli. The gene is adjacent to the ackA gene, which encodes the enzyme that catalyzes the second step—acetate kinase. Enzyme activity assays performed on cell extracts from Escherichia coli and Clostridium acetobutylicum harboring the subclone showed elevated activity. The enzymes shows a decrease in specific activity when the organism reaches the solvent formation stage.

[0494] Enzymes having phosphate acetyltransferase activity or phosphate acetyltransferase genes have also been identified or measured from E. coli (eutD, pta), Roseovarius nubinhibens ISM, Clostridium kluyveri, Chlamydomonas reinhardtii (PAT2), Dasytricha ruminantium, Pelobacter acetylenicus, Gottschalkia acidurici, Lactobacillus sanfranciscensis, Paracoccus denitrificans NKNIS, Eubacterium oxidoreducens G41, Mycoplasma pneumoniae M129, Thermotoga maritima, Moorella thermoacetica, Methanosarcina thermophile, Clostridium propionicum and Fusobacterium nucleatum.

[0495] In some embodiments, an enzyme having phosphate acetyltransferase activity is encoded by an amino acid sequence having at least 70% sequence identity, at least 80% sequence identity, or at least 90% sequence identity to an enzyme having phosphate acetyltransferase activity selected from E. coli pta and Clostridium acetobutylicum pta. In a preferred embodiment, an enzyme having phosphate acetyltransferase activity is selected from E. coli pta and Clostridium acetobutylicum pta. In another embodiment, the one or more nucleic acid molecules encoding the phosphate acetyltransferase comprise an amino acid sequence selected from SEQ ID NOs: 220 and 222. In a further embodiment, the one or more nucleic acid molecule encoding the phosphate acetyltransferase is encoded by a nucleic acid sequence selected from SEQ ID NOs: 219 and 221.

### Pentose Phosphatase (EC 3.1.3.23 and EC 3.1.3.1)

[0496] The present disclosure describes enzymes that can catalyze the following reactions:

[0497] D-pentose 5-phosphate+H₂O→D-pentose+phosphate

[0498] D-ribose 5-phosphate+H₂O→D-ribose+phosphate

[0499] D-xylulose 5-phosphate+H₂O→D-xylulose+phosphate

[0500] D-ribulose 5-phosphate+H₂O→D-ribulose+phosphate

[0501] a sugar phosphate+H₂O→a sugar+phosphate

[0502] E. coli YbiV is a sugar phosphatase belonging to the family of type II haloacid dehalogenase (HAD)-like hydrolases. It shows a low level of discrimination between its preferred substrates. In addition, YbiV appears to have a low level of phosphotransferase activity using monophosphates as the phosphate donor. The phosphatase activity of YbiV was also discovered in a high-throughput screen of purified proteins. Crystal structures of YbiV have been solved, and a catalytic mechanism was suggested. YbiV may exist as a homodimer in solution.

[0503] E. coli YidA is a promiscuous sugar phosphatase belonging to the superfamily of haloacid dehalogenase (HAD)-like hydrolases. Its preferred substrate is erythrose-4-phosphate. YidA selectively hydrolyzes α-D-glucose-1-phosphate and has no activity with the β form. The reaction proceeds via the canonical phosphomonoester hydrolase mechanism, which involves breakage of the P—O bond, not the Cl—O bond. The phosphatase activity of YidA was first discovered in a high-throughput screen of purified proteins. Mutagenesis of the predicted catalytic Asp residue in YidA results in loss of phosphatase activity. YidA does not catalyze phosphoryl transfer to a sugar acceptor.

[0504] E. coli alkaline phosphatase (phoA) is a periplasmic, homodimeric enzyme that catalyses the hydrolysis and transphosphorylation of a wide variety of phosphate monoesters. The reaction proceeds through a phosphoseryl intermediate with the subsequent release of inorganic phosphate and alcohol. The transphosphorylation reaction results in the transfer of a phosphoryl group to the alcohol of acceptors such as Tris or ethanolamine. Alkaline phosphatase is a metalloenzyme, binding two zinc atoms and one magnesium ion per monomer. Alkaline phosphatase occurs in three major forms designated isozymes 1, 2 and 3 whose relative proportions are dependent on the growth conditions. The isozymes are differentiated by the presence or absence of an NH2-terminal arginine residue: present in both subunits of isozyme 1, absent in both subunits of isozyme 3 and heterogenous in isozyme 2. Removal of the N-terminal arginine is catalysed by the membrane-associated, proteolytic enzyme Tap. The precursor polypeptide is secreted across the inner membrane to the periplasmic space concommitant with removal of the signal sequence. Folding of PhoA in vivo is catalysed by the periplasmic protein, DsbA and is thought to occur as the polypeptide elongates from the ribosome. phoA is part of the phosphate regulon; its expression is positively regulated by the PhoB transcriptional regulator.

[0505] In some embodiments, the pentose phosphatase is an alkaline phosphatase. In some preferred embodiments, the alkaline phosphatase may be evolved to preferrably act on targeted pentose 5-phosphate. In some embodiments, the pentose phosphatase is a sugar phosphatase. In other embodiments, the sugar phosphatase may be evolved to preferrably act on targeted pentose 5-phosphate. In some embodiments, the pentose phosphatase is a haloacid dehalogenase-like hydrolase. In another embodiment, the haloacid dehalogenase-like hydrolase may be evolved to preferrably act on targeted pentose 5-phosphate.

[0506] In some embodiments, the pentose phosphatase is selected from one or more of a D-pentose-5-phosphatase, a D-xylulose-5-phosphatase, a D-ribose-5-phosphatase, and a D-ribulose-5-phosphatase. In some embodiments, the pentose phosphatase is encoded by an amino acid sequence having at least 70% sequence identity, at least 80% sequence identity, or at least 90% sequence identity to a D-pentose-5-phosphatase selected from the group consisting of E. coli phoA, E. coli yfbT and E. coli yidA. In some embodiments, the D-xylulose-5-phosphatase is encoded by an amino acid sequence having at least 70% sequence identity, at least 80% sequence identity, or at least 90% sequence identity to Bacillus subtilis araL. In some embodiments, the D-ribose-5-phosphatase is encoded by an amino acid sequence having at least 70% sequence identity, at least 80% sequence identity, or at least 90% sequence identity to a D-ribose-5-phosphatase selected from the group consisting of Arabidopsis thaliana SGPP, Pseudomonas fluorescens PFLU_2693, and E. coli ybiV. In some embodiments, the D-ribulose-5-phosphatase is encoded by an amino acid sequence having at least 70% sequence identity, at least 80% sequence identity, or at least 90% sequence identity to Plasmodium falciparum PF10_0325.

[0507] In some embodiments, the one or more nucleic acid molecules encoding the D-pentose-5-phosphatase is selected from the group consisting of SEQ ID NOs: 159, 161, 163, 165, 167, 169, 171 and 173. In another embodiment, the one or more nucleic acid molecules encoding the D-pentose-5-phosphatase comprise an amino acid sequence selected from the group consisting of SEQ ID NOs: 160, 162, 164, 166, 168, 170, 172 and 174.

### Arabitol Phosphate Dehydrogenase (EC 1.1.1.-)

[0508] The present disclosure describes enzymes that can catalyze the following reactions:

[0509] D-arabitol 1-phosphate+NAD+↔D-xylulose 5-phosphate+NADH+H+

[0510] D-arabitol 5-phosphate+NAD+↔D-ribulose 5-phosphate+NADH+H+

[0511] D-arabitol 1-phosphate+NAD+↔D-ribulose 1-phosphate+NADH+H+

[0512] D-arabitol 5-phosphate+NAD+↔D-xylulose 1-phosphate+NADH+H+

[0513] D-arabitol-phosphate dehydrogenase APDH from Enterococcus avium has been purified to homogeneity. The protein, which forms a homotetramer, catalyzes the dehydrogenation of both D-arabitol 1-phosphate and D-arabitol 5-phosphate, producing D-xylulose 5-phosphate and D-ribulose 5-phosphate, respectively. Maximal velocity with D-arabitol 1-phosphate was 10-fold than with D-arabitol 5-phosphate. The purified protein was partially sequenced, and the APDH gene encoding it was cloned. The enzyme requires Mn2+ and can not utilize Zn2+ for activity. Both NAD(+) and NADP(+) were accepted as cofactors, but reaction rates with NAD+/NADH were about 14 times higher than with NADP+/NADPH. The enzyme catalyzes a reversible reaction, but the rate of the reduction reaction is much higher that the oxidative reaction. Kinetic data suggests that the enzyme forms a ternary complex with its substrate and NADH. Both biochemical evidence and protein sequence homology comparisons indicate that similar enzymes are widespread among the Gram-positive bacteria and participate in arabitol catabolism.

[0514] In some embodiments, the pentol dehydrogenase activity may be evolved to apply to pentol phosphate.

[0515] In some embodiments, the arabitol phosphate dehydrogenase is selected from one or more of an enzyme having D-arabitol 1-phosphate 4-dehydrogenase activity, an enzyme having D-arabitol 5-phosphate 2-dehydrogenase activity, an enzyme having D-arabitol 1-phosphate 2-dehydrogenase activity and an enzyme having D-arabitol 5-phosphate 4-dehydrogenase activity.

[0516] In some embodiments, an enzyme having D-arabitol 1-phosphate 4-dehydrogenase activity is encoded by an amino acid sequence having at least 70% sequence identity, at least 80% sequence identity, or at least 90% sequence identity to APDH from Enterococcus avium. In a preferred embodiment, an enzyme having D-arabitol 1-phosphate 4-dehydrogenase activity is APDH from Enterococcus avium. In some embodiments, the one or more nucleic acid molecules encoding a D-arabitol 1-phosphate 4-dehydrogenase is set forth in SEQ ID NO: 175. In another embodiment, the one or more nucleic acid molecules encoding a D-arabitol 1-phosphate 4-dehydrogenase comprise an amino acid sequence set forth in SEQ ID NO: 176.

[0517] In some embodiments, an enzyme having D-arabitol 5-phosphate 2-dehydrogenase activity is encoded by an amino acid sequence having at least 70% sequence identity, at least 80% sequence identity, or at least 90% sequence identity to APDH from Enterococcus avium. In a preferred embodiment, an enzyme having D-arabitol 5-phosphate 2-dehydrogenase activity is APDH from Enterococcus avium. In some embodiments, the one or more nucleic acid molecules encoding a D-arabitol 5-phosphate 2-dehydrogenase is set forth in SEQ ID NO: 175. In another embodiment, the one or more nucleic acid molecules encoding a D-arabitol 5-phosphate 2-dehydrogenase comprise an amino acid sequence set forth in SEQ ID NO: 176.

[0518] In some embodiments, an enzyme having D-arabitol 1-phosphate 2-dehydrogenase activity is encoded by an amino acid sequence having at least 70% sequence identity, at least 80% sequence identity, or at least 90% sequence identity to an enzyme having D-arabitol 1-phosphate 2-dehydrogenase activity selected from the group consisting of Candida albicans ARD1, Candida tropicalis ARD1, Scheffersomyces stipitis ARDH, Bacillus subtilis egsA (araM), Aeropyrum pernix egsA, E. coli gpsA and Saccharomyces cerevisiae GPD1. In a preferred embodiment, an enzyme having D-arabitol 1-phosphate 2-dehydrogenase activity is selected from the group consisting of Candida albicans ARD1, Candida tropicalis ARD1, Scheffersomyces stipitis ARDH, Bacillus subtilis egsA (araM), Aeropyrum pernix egsA, E. coli gpsA and Saccharomyces cerevisiae GPD1. In some embodiments, the one or more nucleic acid molecules encoding a D-arabitol 1-phosphate 2-dehydrogenase is selected from the group consisting of SEQ ID NOs: 177, 179, 181, 189, 191, 193 and 195. In another embodiment, the one or more nucleic acid molecules encoding a D-arabitol 1-phosphate 2-dehydrogenase comprise an amino acid sequence selected from the group consisting of SEQ ID NOs: 178, 180, 182, 190, 192, 194 and 196.

[0519] In some embodiments, an enzyme having D-arabitol 5-phosphate 4-dehydrogenase activity is encoded by an amino acid sequence having at least 70% sequence identity, at least 80% sequence identity, or at least 90% sequence identity to an enzyme having D-arabitol 5-phosphate 4-dehydrogenase activity selected from the group consisting of Pseudomonas fluorescens mtlD, Klebsiella pneumoniae dalD, Ralstonia solanacearum dalD, Bacillus subtilis egsA (araM), Aeropyrum pernix egsA, E. coli gpsA and Saccharomyces cerevisiae GPD1. In a preferred embodiment, an enzyme having D-arabitol 5-phosphate 4-dehydrogenase activity is selected from the group consisting of Pseudomonas fluorescens mtlD, Klebsiella pneumoniae dalD, Ralstonia solanacearum dalD, Bacillus subtilis egsA (araM), Aeropyrum pernix egsA, E. coli gpsA and Saccharomyces cerevisiae GPD1. In some embodiments, the one or more nucleic acid molecules encoding a D-arabitol 5-phosphate 4-dehydrogenase is selected from the group consisting of SEQ ID NOs: 183, 185, 187, 189, 191, 193 and 195. In another embodiment, the one or more nucleic acid molecules encoding a D-arabitol 5-phosphate 4-dehydrogenase comprise an amino acid sequence selected from the group consisting of SEQ ID NOs: 184, 186, 188, 190, 192, 194 and 196.

### Phosphopentomutase (EC 5.4.2.-)

[0520] The present disclosure describes enzymes that can catalyze the following reactions:

[0521] D-xylulose 5-phosphate↔D-xylulose 1-phosphate

[0522] D-ribulose 5-phosphate↔D-ribulose 1-phosphate

[0523] α-D-ribose-1-phosphate↔D-ribose 5-phosphate

[0524] 2-deoxy-α-D-ribose 1-phosphate↔2-deoxy-D-ribose 5-phosphate

[0525] E. coli phosphopentomutase deoB is a catabolic enzyme which catalyzes the transfer of a phosphate group between the C1 and the C5 carbon atoms of ribose and deoxyribose, respectively.

[0526] A mutation in deoB suppresses the high thymine requirement for growth of thy mutants and improves the survival of thyA mutants in stationary phase. Transposon insertion mutations in deoB suppress the growth defect of a tktA tktB mutant. Deletion of deoB increases glycerol consumption as well as hydrogen and ethanol production compared to wild type, and increases lycopene production in an engineered strain. The deo operon has a complex pattern of regulation. Expression of deoB is downregulated by nitrogen starvation. The E. coli phosphopentomutase appears to be biochemically and structurally distinct from mammalian phosphopentomutase, making it a potential target for antibiotic development.

[0527] In some embodiments, the phosphopentomutase (PPM), also named here as phosphosugarmutase (PSM) also has phosphoglucomutase activity, and is Saccharomyces cerevisiae phosphoribomutase PRM15 (also known as PGM3) (SEQ ID NO. 255 or SEQ ID NO: 258). In some embodiments, the phosphopentosemutase is encoded by an aminoacid sequence having at least 70% sequence identity, at least 80% sequence identity or at least 90% sequence identity to the Pgm3 from Saccharomyces cerevisiae.

[0528] In some embodiments, the phosphopentomutase is Homo sapiens phosphoglucomutase-2 (PGM2).

[0529] In some embodiments, a phosphopentomutase activity may be evolved to apply to D-xylulose 5-phosphate. In other embodiments, a phosphopentomutase activity may be evolved to apply to D-ribulose 5-phosphate. In some embodiments, an alpha-phosphoglucomutase activity may be evolved to apply to D-ribulose 5-phosphate or D-xylulose 5-phosphate. This enzyme from the class EC 5.4.2.2 is reported to require α-glucose 1,6-bisphosphate as co-factor. In further embodiments, a beta-phosphoglucomutase activity may be evolved to apply to D-ribulose 5-phosphate or D-xylulose 5-phosphate. Enzymes from the class EC 5.4.2.6 are reported to be able to autophosphorylate themselves, thus not requiring external glucose 1,6-bisphosphate as co-factor. In yet further embodiments, a phosphomannomutase activity may be evolved to apply to D-ribulose 5-phosphate or D-xylulose 5-phosphate. This enzyme from the class EC 5.4.2.8 is reported to require α-glucose 1,6-bisphosphate or α-D-Mannose 1,6-bisphosphate as co-factor.

[0530] In some embodiments, an enzyme having phosphopentomutase activity is encoded by an amino acid sequence having at least 70% sequence identity, at least 80% sequence identity, or at least 90% sequence identity to an enzyme having phosphopentomutase activity selected from the group consisting of E. coli deoB, E. coli pgm, Bacillus subtilis pgcA, Lactococcus lactis pgmB, E. coli ycjU, Pseudomonas aeruginosa algC, and E. coli cpsG. In a preferred embodiment, an enzyme having phosphopentomutase activity is selected from the group consisting of E. coli deoB, E. coli pgm, Bacillus subtilis pgcA, Lactococcus lactis pgmB, E. coli ycjU, Pseudomonas aeruginosa algC, S. cerevisiae PGM3, and E. coli cpsG. In some embodiments, the one or more nucleic acid molecules encoding a phosphopentomutase is selected from the group consisting of SEQ ID NOs: 197, 199, 201, 203, 205, 207 and 209. In another embodiment, the one or more nucleic acid molecules encoding a phosphopentomutase comprise an amino acid sequence selected from the group consisting of SEQ ID NOs: 198, 200, 202, 204, 206, 208 and 210.

### Glucose-6-Phosphate 1-Dehydrogenase (EC 1.1.1.49)

[0531] The present disclosure describes enzymes that can catalyze the following reaction:

[0532] D-glucose 6-phosphate+NADP⁺↔6-phospho-D-glucono-1,5-lactone+NADPH

[0533] Glucose-6-phosphate 1-dehydrogenase may also be known as glucose-6-phosphate dehydrogenase (NADP+); NADP-glucose-6-phosphate dehydrogenase; Zwischenferment; D-glucose 6-phosphate dehydrogenase; glucose 6-phosphate dehydrogenase (NADP); NADP-dependent glucose 6-phosphate dehydrogenase; 6-phosphoglucose dehydrogenase; Entner-Doudoroff enzyme; G6PDH; GPD; glucose-6-phosphate dehydrogenase.

[0534] Glucose-6-phosphate dehydrogenase (G6PDH) is the first enzyme of the pentose phosphate pathway and provides a large fraction of the NADPH needed for anabolism.

[0535] The E. coli G6PDH shows a strong preference for NADP+ over NAD+. The structural basis for this preference was studied using molecular simulations, kinetic characterization of site-directed mutants and phylogenetic analyses.

[0536] Metabolic flux through the pathways of central carbon metabolism was measured using GC-MS and ¹³C labeling and 2D NMR spectroscopy. Regulation of these pathways under different growth conditions was measured at the level of enzyme expression and activity.

[0537] Substitution of an NADH-producing glucose-6-phosphate dehydrogenase for the native NADPH-producing enzyme reduced the growth rate of otherwise wild-type cells, while increasing the growth rate of a Δpgi mutant. This suggests that whether production of NADH by G6PDH is beneficial or detrimental in vivo depends on the operation of the upper Embden-Meyerhof pathway.

[0538] In addition to its role in central carbon metabolism, G6PDH was found to be the source of a linear peptide with the amino acid sequence Asn-Asn-Trp-Asn-Asn (NNWNN) that acts as an “extracellular death factor” (EDF) for MazEF-mediated cell death. The peptide acts by increasing the endoribonuclease activity of the toxins MazF and ChpBK. EDF production under stress conditions is due to cleavage of the zwf mRNA at specific ACA sites by MazF, generating a leaderless truncated mRNA. The location of the EDF-coding region with respect to the MazF cleavage sites is important, and the trans-translation system is required.

[0539] zwf is one of the most consistently flux-coupled genes, which are genes whose expression transition patterns upon perturbations are correlated with their corresponding flux values. Expression of zwf is growth rate-regulated at the transcriptional level. G6PDH activity is greater in rapidly growing cells, and is greater under nitrogen-limited compared to carbon-limited growth conditions. zwf is a part of the SoxRS regulon which responds to superoxide stress. Additional regulators have been shown to activate transcription of zwf. Exposure to tellurite activates transcription of zwf and thereby increases the synthesis of NADPH.

[0540] A zwf null mutation does not affect the growth rate significantly. However, central carbon metabolism and metabolic flux is changed. A pgi zwf double mutant does not grow on glucose as the sole source of carbon. In the presence of glucose, it accumulates high levels of glucose-6-phosphate, which inhibits fructose-1,6-bisphosphatase I activity. Deletion of zwf reduces the organic solvent tolerance of E. coli JM109.

[0541] In some embodiments, a recombinant microorganism producing MEG (or glycolic acid), or optionally, MEG (or glycolic acid) and one or more co-product, comprises a deletion, insertion, or loss of function mutation in a gene encoding a glucose-6-phosphate dehydrogenase to prevent the flux of glucose-6-phosphate through the oxidative branch of the pentose phosphate pathway and instead shunt glucose-6-phosphate through the non-oxidative branch of the pentose phosphate pathway to produce one or more pentose-5-phosphate intermediate.

### 6-Phosphogluconolactonase (EC 3.1.1.31)

[0542] The present disclosure describes enzymes that can catalyze the following reaction:

[0543] 6-phospho D-glucono-1,5-lactone+H₂O→D-gluconate 6-phosphate+H+

[0544] 6-phosphogluconolactonase may also be known as phosphogluconolactonase; 6-PGL.

[0545] 6-phosphogluconolactonase is an enzyme of the oxidative pentose phosphate pathway.

[0546] A pgl mutant strain grows only slightly slower than wild type on glucose as the sole source of carbon. Growth on glucose may be due to non-enzymatic hydrolysis of 6-phospho D-glucono-1,5-lactone or a bypass pathway that involves dephosphorylation and export of gluconolactone, hydrolysis to gluconate, followed by gluconate re-import and phosphorylation. When grown on maltose medium, strains lacking Pgl activity turn blue after iodine treatment. The phenotype of a pgl deletion strain can be complemented by expression of the pgl gene from Pseudomonas putida, although there is no detectable similarity between the two genes.

[0547] A strategy for metabolic engineering of E. coli for the production of riboflavin included overexpression of pgl, leading to an increase in riboflavin titer.

[0548] pgl is part of a genomic region that is deleted in the E. coli B strain BL21, but is present in the K-12 strain MG1655.

[0549] In some embodiments, a recombinant microorganism producing MEG (or glycolic acid), or optionally, MEG (or glycolic acid) and one or more co-product, comprises a deletion, insertion, or loss of function mutation in a gene encoding a 6-phosphogluconolactonase to prevent the flux of glucose-6-phosphate through the oxidative branch of the pentose phosphate pathway and instead shunt glucose-6-phosphate through the non-oxidative branch of the pentose phosphate pathway to produce one or more pentose-5-phosphate intermediate.

### 6-Phosphogluconate Dehydrogenase, Decarboxylating (EC 1.1.1.44)

[0550] The present disclosure describes enzymes that can catalyze the following reaction:

[0551] D-gluconate 6-phosphate+NADP+→D-ribulose 5-phosphate+CO₂+NADPH

[0552] 6-phosphogluconate dehydrogenase may also be known as phosphogluconate dehydrogenase (NADP+-dependent, decarboxylating); phosphogluconic acid dehydrogenase; 6-phosphogluconic dehydrogenase; 6-phosphogluconic carboxylase; 6-phospho-D-gluconate dehydrogenase; glyceraldehyde 3-phosphate dehydrogenase.

[0553] 6-phosphogluconate dehydrogenase is an enzyme of the oxidative branch of the pentose phosphate pathway.

[0554] Three crystal structures of the enzyme in complex with substrate and cosubstrate compounds have been solved. Binding of NADP+ may induce a conformational change in the enzyme. A catalytic mechanism has been proposed.

[0555] gnd is a highly polymorphic gene within E. coli populations, likely due to interstrain transfer and recombination. This may be a result of its proximity to the rfb region, which determines O antigen structure.

[0556] Expression of 6-phosphogluconate dehydrogenase is growth rate-regulated. Most of the growth rate-dependent increase in Gnd levels is due to increased transcription, leading to higher mRNA levels. Posttranscriptional regulation involves a secondary structure element between codons 67 and 78 of the gnd mRNA. This region may function by sequestration of the translation initiation region into an mRNA secondary structure, thus reducing the efficiency of translation initiation. However, the effector of this regulatory mechanism has apparently not yet been identified. truA (hisT) mutants reduce the growth rate-dependent increase of Gnd expression by post-transcriptional regulation. Growth under acidic conditions upregulates expression of gnd. gnd is one of the most consistently flux-coupled genes (FCGs), which are genes whose expression transition patterns upon perturbations are correlated with their corresponding flux values.

[0557] Certain growth conditions selected for a deletion mutation in the promoter region that results in increased transcription of gnd and increased enzyme activity. An edd gnd double mutant is unable to grow on gluconate. A null mutation in gnd does not significantly alter the growth rate. However, cellular metabolism and metabolic flux is changed; succinate production is increased during growth on glucose or glycerol. A gnd deletion mutant shows enhanced ethanol and H₂ production compared to wild type during anaerobic growth on glycerol, whereas in a different, heavily engineered strain, overexpression of gnd increases ethanol and H₂ production.

[0558] In some embodiments, a recombinant microorganism producing MEG (or glycolic acid), or optionally, MEG (or glycolic acid) and one or more co-product, comprises a deletion, insertion, or loss of function mutation in a gene encoding a 6-phosphogluconate dehydrogenase to prevent the flux of glucose-6-phosphate through the oxidative branch of the pentose phosphate pathway and instead shunt glucose-6-phosphate through the non-oxidative branch of the pentose phosphate pathway to produce one or more pentose-5-phosphate intermediate.

### Glyceraldehyde 3-Phosphate Dehydrogenase, Phosphorylating (EC 1.2.1.12)

[0559] The present disclosure describes enzymes that can catalyze the following reaction:

[0560] D-glyceraldehyde 3-phosphate+NAD++phosphate↔1,3-bisphospho-D-glycerate+NADH+H+

[0561] Glyceraldehyde 3-phosphate dehydrogenase may also be known as glyceraldehyde-3-phosphate dehydrogenase (phosphorylating); triosephosphate dehydrogenase; dehydrogenase, glyceraldehyde phosphate; phosphoglyceraldehyde dehydrogenase; 3-phosphoglyceraldehyde dehydrogenase; NAD+-dependent glyceraldehyde phosphate dehydrogenase; glyceraldehyde phosphate dehydrogenase (NAD+); glyceraldehyde-3-phosphate dehydrogenase (NAD+); NADH-glyceraldehyde phosphate dehydrogenase; glyceraldehyde-3-P-dehydrogenase.

[0562] Glyceraldehyde 3-phosphate dehydrogenase A catalyzes the reversible oxidative phosphorylation of D-glyceraldehyde-3-phosphate to 1,3-bisphospho-D-glycerate in the presence of NAD+ and phosphate during glycolysis and gluconeogenesis in E. coli. The enzyme is also found in many other organisms and its properties have been extensively studied.

[0563] E. coli is unusual in having two glyceraldehyde-3-phosphate dehydrogenase (GAPDH) activities encoded by gapA and epd (gapB). However, the gapA encoded enzyme has a highly efficient phosphorylating glyceraldehyde-3-phosphate dehydrogenase activity and a low phosphorylating erythrose-4-phosphate dehydrogenase activity, whereas the epd encoded enzyme has an efficient non-phosphorylating erythrose-4-phosphate dehydrogenase activity and a very low phosphorylating glyceraldehyde-3-phosphate dehydrogenase activity.

[0564] The GapA protein has a sequence that is more similar to eukaryotic sequences than to the thermophilic bacterial enzymes, and to prokaryotic enzymes in general. The gapA product is required for glycolysis, while the epd product is not. Both enzymes may be involved in production of pyridoxal 5′-phosphate (PLP).

[0565] Early studies of gapA mutants from E. coli K-10 implicated its role in glycolysis and demonstrated some of its catalytic properties. A gapA mutant exhibits a growth defect and also exhibits increased aggregation and lysis phenotypes that are rescued by high-salt media.

[0566] Regulation of gapA gene expression has been studied. The regulation of the fkpA, gapA, and hslT genes is affected by evolution under conditions of chronic heat stress.

[0567] The E. coli sequence contains several amino acids that are conserved in all GAPDHs and are postulated to be involved in NAD+ binding, or the catalytic mechanism.

[0568] The crystal structure of the wild-type enzyme in the presence of NAD+ has been determined at 1.80 Å resolution and was similar to those of other GAPDHs. The crystal structure of a N313T mutant was also determined at 2.17 Å resolution. Several other E. coli GAPDH crystal structures have been reported with and without bound NAD+, and in the hemiacetal intermediate state.

[0569] Molecular factors responsible for the NAD+ cofactor stereospecificity have been studied using site-directed mutagenesis. The enzyme is a B-specific dehydrogenase that catalyzes transfer of the pro-S hydrogen and binds NAD(H) in the syn nicotinamide orientation. Refolding of denatured E. coli GAPDH in the presence of chaperone protein Tig; trigger factor has been studied.

[0570] ADP-ribosylated GAPDH is a secreted virulence factor in some fungi and Gram-positive pathogens, as well as in pathogenic strains of E. coli. Non-pathogenic E. coli do not secrete GAPDH. Evidence suggests that E. coli GAPDH is also involved in DNA repair.

[0571] A series of vectors inducibly expressing paired-terminus antisense RNAs was constructed to silence central carbon metabolism in host E. coli K-12 MG1655. A vector that silenced gapA at 93% efficacy caused severe growth inhibition. Regulating the expression of an engineered E. coli gapA through changes in temperature has been demonstrated to control glycolysis.

[0572] In some embodiments, a recombinant microorganism producing MEG (or glycolic acid), or optionally, MEG (or glycolic acid) and one or more co-product, comprises a deletion, insertion, or loss of function mutation in a gene encoding a glyceraldehyde 3-phosphate dehydrogenase to prevent the conversion of glyceraldehyde 3-phosphate to 1,3-bisphospho-D-glycerate and instead allow D-glyceraldehyde 3-phosphate to be converted to D-xylulose-5-phosphate (with a concurrent conversion of fructose-6-phosphate to D-erythrose-4-phosphate) by a transketolase, and thus produce a pentose-5-phosphate intermediate needed for the production of MEG (or glycolic acid), or optionally, MEG (or glycolic acid) and one or more co-product and provide more D-erythrose-4-phosphate for the non-oxidative branch of the pentose phosphate pathway to further produce one or more pentose-5-phosphate intermediate.

### 6-Phosphofructokinase (EC 2.7.1.11)

[0573] Phosphofructokinase (Pfk) catalyzes the phosphorylation of fructose-6-phosphate on the C1 carbon during glycolysis. E. coli contains two Pfk isozymes, Pfk-1 (pfkA) and Pfk-2 (pfkB), which do not share sequence similarity. More than 90% of the phosphofructokinase activity present in wild type E. coli can be attributed to Pfk-1.

[0574] PfkA catalyzes the phosphorylation of fructose-6-phosphate and is a key enzyme regulating the glycolysis pathway. The enzyme cannot catalyze the reverse reaction in vivo. The enzyme shows cooperative kinetics with the substrate fructose-6-phosphate, but not with the other substrate, ATP. Recently, it was shown that PfkA also catalyzes phosphorylation of sedoheptulose-7-phosphate as part of the sedoheptulose bisphosphate bypass. Crystal structures of PfkA have been solved with and without activators and inhibitors. Based on sequence similarity, PfkA was predicted to be an NAD+ kinase.

[0575] PfkB is a member of the ribokinase family of sugar kinases. PfkB, unlike PfkA, does not show cooperative interaction with fructose-6-phosphate, inhibition by PEP or activation by ADP. MgATP²⁻ is the true substrate of the enzyme. PfkB can also use tagatose-6-phosphate as a substrate. This reaction is part of the galactitol catabolism pathway. A crystal structure of PfkB in the tetrameric form inhibited by MgATP has been solved at 1.98 Å resolution. Comparison of this structure with a crystal structure of PfkB in complex with fructose-6-phosphate suggests negative interplay between fructose-6-phosphate binding and MgATP binding.

[0576] In some embodiments, a recombinant microorganism producing MEG (or glycolic acid), or optionally, MEG (or glycolic acid) and one or more co-product, comprises a deletion, insertion, or loss of function mutation in a gene encoding a 6-phosphofructokinase to prevent the conversion of fructose-6-phosphate to 1,6-bisphosphate and instead allow fructose-6-phosphate to be converted to erythrose-4-phosphate and acetyl-phosphate by a fructose-6-phosphate phosphoketolase, and provide more erythrose-4-phosphate for the non-oxidative branch of the pentose phosphate pathway to further produce one or more pentose-5-phosphate intermediate needed for the production of MEG (or GA), or optionally, MEG (or GA) and one or more co-product. In some embodiments, the 6-phosphofructokinase is pfkA and/or pfkB.

[0577] Hydroxypyruvate decarboxylase, 2-oxo2lutarate decarboxylase, 2-keto acid decarboxylase (EC 4.1.1.-)

[0578] The present disclosure describes enzymes that can catalyze the following reactions:

[0579] hydroxypyruvate+H+↔CO₂+glycolaldehyde

[0580] 2-oxoglutarate+coenzyme A+NAD+→succinyl-CoA+CO₂+NADH

[0581] 4-methyl-2-oxopentanoate+H+→3-methylbutanal+CO₂

[0582] 3-methyl-2-oxobutanoate+H+→isobutanal+CO₂

[0583] Hydroxypyruvate decarboxylase may also be known as hydroxypyruvate carboxy-lyase.

[0584] 2-oxoglutarate decarboxylase may also be known as oxoglutarate decarboxylase; alpha-ketoglutarate decarboxylase; alpha-ketoglutaric decarboxylase; pre-2-oxoglutarate decarboxylase; 2-oxoglutarate carboxy-lyase.

[0585] E. coli SucA is responsible for the 2-oxoglutarate decarboxylase activity of the 2-oxoglutarate dehydrogenase multienzyme complex (OGDHC) that catalyzes the conversion of 2-oxoglutarate (2-ketoglutarate) to succinyl-CoA and CO₂, with the production of NADH.

[0586] The OGDHC is a member of the 2-oxo acid dehydrogenase family. Members of this family contain multiple copies of three enzymatic components: 2-oxoglutarate decarboxylase (E1), lipoamide acyltransferase (E2) and lipoamide dehydrogenase (E3). In most Gram-positive bacteria and in mitochondria the E1 component is a heterodimer composed of two subunits, while in most (but not all) Gram-negative bacteria it is made up of a single type of subunit. In both cases multiple copies of the E1 component along with multiple copies of the E3 component are assembled around an E2 core of 24 subunits with octahedral symmetry, or 60 subunits with eicosahedral symmetry (depending on which complex and species). In E. coli the E3 component is shared with the pyruvate dehydrogenase and glycine cleavage multi-enzyme complexes. E1 and E2 differ slightly for the 2-oxoglutarate and pyruvate dehydrogenase complexes, and are designated (o) and (p) to distinguish them.

[0587] The E. coli OGDHC contains 12 units of the E1(o) component 2-oxoglutarate decarboxylase, thiamine-requiring encoded by sucA, 24 units of the E2(o) comoponent dihydrolipoyltranssuccinylase encoded by sucB, and 2 units of the E3 component lipoamide dehydrogenase encoded by lpd. The 24 E2(o) units form the octahedral core of the complex. They contain lipoyllysine and binding sites for dimers of the E1(o) and E3 subunits. Electron cryotomography showed that they are flexibly tethered to the E2 core.

[0588] During the OGDHC reaction cycle, 2-oxoglutarate is bound and decarboxylated by SucA, a thiamin-diphosphate cofactor containing enzyme. The crystal structure of a truncated, apo form of SucA lacking the N-terminal 77 residues has been determined at 2.6 Å resolution. The structure of the holo form with thiamin diphosphate and Mg′ was determined at 3.5 Å resolution. The truncated form retained decarboxylase activity but did not assemble with E2(o) into an OGDH complex. Data also suggested the presence of an AMP binding site. An oxygen-dependent thiamin free radical was demonstrated in the OGDHC, which was generated by a side reaction with O₂.

[0589] Studies of engineered SucA prepared by saturation mutagenesis of His260 and His298 suggested that His260 is required for substrate recognition, but His298 could be replaced by hydrophobic residues of similar size. Data also suggested that E2(o) has a role in specificity.

[0590] The sucA gene was cloned and sequenced in earlier work and regulation of sucABCD was studied. The sucAB and sucCD genes were shown to be mutually essential, with either pair sufficient to produce succinyl-CoA, but simultaneous deletion of sucAB and sucCD was not viable.

[0591] α-ketoisovalerate decarboxylase catalyzes the decarboxylation of 3-methyl-2-oxobutanoate to isobutanal. The enzyme is highly specific for 3-methyl-2-oxobutanoate, but also shows activity with other branched-chain 2-keto acids (4-methyl-2-oxopentanoate, 22.7% relative activity; (S)-3-methyl-2-oxopentanoate, 16.7%, 2-oxo-3-phenylpropanoate, 7.1% and 4-(methylthio)-2-oxobutanoate, 5.8%.

[0592] The enzyme is a homo-tetramer, encoded by the kivd gene, which has been sequenced and cloned. The deduced protein sequence shares 98.6% identity (over its first 438 amino acids) with an L. lactis strain IL1403 protein, encoded by the ipd gene (this gene is interrupted at position L439 by the insertion of an IS983 element). The kivd gene does not have any homology with any gene(s) in the sequenced genomes of L. lactis strains MG1363 and SK11.

[0593] A study of the Kivd activity testing 156 lactic acid bacteria strains (Lactococcus, Lactobacillus, Leuconostoc) indicated that only L. lactis strains possess the activity, and even within lactococcal strains, only 7 out of 45 strains had the activity.

[0594] A homologous protein has been described from L. lactis strain B1157 as branched-chain α-keto acid decarboxylase. That protein shows 89.8% identity with Kivd and also has a preference for 2-keto-isovalerate.

[0595] In some embodiments, an enzyme having 2-keto acid decarboxylase activity, an enzyme having hydroxypyruvate decarboxylase activity or an enzyme having 2-oxoglutarate decarboxylase activity converts hydroxypyruvate to glycolaldehyde. In some embodiments, the enzyme that converts hydroxypyruvate to glycolaldehyde is encoded by an amino acid sequence having at least 70% sequence identity, having at least 80% sequence identity, or having at least 90% sequence identity to Kivd or SucA. In some embodiments, the enzyme having 2-keto acid decarboxylase activity is Kivd. In some embodiments, the enzyme having 2-oxoglutarate decarboxylase activity is SucA.

[0596] In some embodiments, the one or more nucleic acid molecules encoding the enzyme having 2-oxoglutarate decarboxylase activity is sucA, or homolog thereof. In some embodiments, the one or more nucleic acid molecules encoding the enzyme having 2-keto acid decarboxylase activity is Kivd, or homolog thereof. In another embodiment, the one or more nucleic acid molecules encoding an enzyme having 2-keto acid decarboxylase activity, an enzyme having hydroxypyruvate decarboxylase activity or an enzyme having 2-oxoglutarate decarboxylase activity comprise an amino acid sequence selected from SEQ ID NOs: 224 and 226. In a further embodiment, the one or more nucleic acid molecule encoding an enzyme having 2-keto acid decarboxylase activity, an enzyme having hydroxypyruvate decarboxylase activity or an enzyme having 2-oxoglutarate decarboxylase activity is encoded by a nucleic acid sequence selected from SEQ ID NOs: 223 and 225.

### 2-Oxoglutarate Reductase, 3-Phospho-Hydroxypyruvate Reductase, 3-Phosphoglycerate Dehydrogenase (EC 1.1.1.-)

[0597] The present disclosure describes enzymes that can catalyze the following reactions:

[0598] (S)-2-hydroxyglutarate+NAD+↔2-oxoglutarate+NADH+H+

[0599] 3-phospho-D-glycerate+NAD+↔3-phospho-hydroxypyruvate+NADH+H+

[0600] (R)-2-hydroxyglutarate+NAD+↔2-oxoglutarate+NADH+H+

[0601] 3-phosphoglycerate dehydrogenase may also be known as phosphoglycerate dehydrogenase; PHGDH (gene name); D-3-phosphoglycerate:NAD+ oxidoreductase; alpha-phosphoglycerate dehydrogenase; 3-phosphoglyceric acid dehydrogenase; D-3-phosphoglycerate dehydrogenase; glycerate 3-phosphate dehydrogenase; glycerate-1,3-phosphate dehydrogenase; phosphoglycerate oxidoreductase; phosphoglyceric acid dehydrogenase; SerA; 3-phosphoglycerate:NAD+2-oxidoreductase; SerA 3PG dehydrogenase; 3PHP reductase.

[0602] 3-phosphoglycerate dehydrogenase catalyzes the first committed step in the biosynthesis of L-serine. The enzyme is regulated by allosteric end-product inhibition that shows cooperativity. Inhibition by serine acts primarily through reduction of catalytic velocity and has only a small effect on the Kms of the substrates; SerA is thus classified as a type V allosteric enzyme.

[0603] The basis for allosteric and cooperative inhibition by serine has been studied extensively. Occupation of two of the four serine binding sites in the homotetramer results in 85% inhibition of activity. Further binding of serine shows negative cooperativity. Phosphate is able to reduce the site-to-site cooperative effects on serine binding; the effect was mainly due to the presence of intrinsically bound NADH. A Trp139Gly mutation results in a homodimeric enzyme that has lost cooperativity in serine binding and allosteric inhibition. Site-directed mutagenesis of residues within the effector binding site, the regulatory interface between subunits, and a flexible hinge region support a model where movement of adjacent domains is involved in inhibition of the enzymatic activity. Transient kinetic analysis showed that the cooperativity of inhibition of catalytic activity results from a conformational change due to serine binding. An enzyme missing the regulatory domain is no longer inhibited by serine, but other kinetic parameters remain the same. Hybrid tetramers provided further insight into the mechanism of allosteric inhibition.

[0604] Site-directed mutagenesis has allowed the identification of residues within the active site that contribute to substrate binding and catalysis. Mutations in the hinge region between the substrate and nucleotide binding domains affect the kcat of the enzyme; certain mutations uncouple serine binding and catalytic inhibition.

[0605] Extensive site-directed mutagenesis and structural studies have contributed to a detailed view of the interactions between allosteric regulation, cooperativity and catalytic activity. Further insight into the catalytic pathway was provided by stopped-flow kinetic analysis, indicating that the rate-limiting step in both catalytic directions is a conformational change of the enzyme. Serine binding appears to lead to the formation of a dead-end quaternary complex between the enzyme, coenzyme, substrate, and effector that eliminates the conformational change subsequent to substrate binding.

[0606] The enzyme has been shown to also have an α-ketoglutarate reductase activity, producing 2-hydroxyglutarate. While the metabolic role of this reaction is not yet known, it is thought that it may play a role in regulating serine biosynthesis and in recycling NADH back to NAD+, especially during anaerobiosis.

[0607] Crystal structures of the wild type enzyme and various mutants have been solved. The structure showed that each subunit of the homotetramer consists of three distinct domains, a nucleotide binding domain, a substrate binding domain, and a regulatory/serine binding domain.

[0608] serA is essential for growth on glycerol minimal medium; the growth defect can be rescued by addition of serine.

[0609] In some embodiments, the enzyme having 3-phosphoglycerate dehydrogenase activity can be an enzyme having 3-phospho-hydroxypyruvate reductase activity or an enzyme having 2-oxoglutarate reductase activity. In some embodiments, an enzyme having 3-phosphoglycerate dehydrogenase activity, an enzyme having 3-phospho-hydroxypyruvate reductase activity, or an enzyme having 2-oxoglutarate reductase activity catalyzes the conversion of glycerate 3-phophate to 3-phosphohydroxypyruvate. In some embodiments, an enzyme having 3-phosphoglycerate dehydrogenase activity, an enzyme having 3-phospho-hydroxypyruvate reductase activity, or an enzyme having 2-oxoglutarate reductase activity is encoded by an amino acid sequence having at least 70% sequence identity, having at least 80% sequence identity, or having at least 90% sequence identity to serA. In some embodiments, the enzyme having 3-phosphoglycerate dehydrogenase activity, the enzyme having 3-phospho-hydroxypyruvate reductase activity, or the enzyme having 2-oxoglutarate reductase activity is serA.

[0610] In some embodiments, the one or more nucleic acid molecules encoding the enzyme having 3-phosphoglycerate dehydrogenase activity is serA, or homolog thereof. In another embodiment, the one or more nucleic acid molecules encoding an enzyme having 3-phosphoglycerate dehydrogenase activity, an enzyme having 3-phospho-hydroxypyruvate reductase activity, or an enzyme having 2-oxoglutarate reductase activity comprises an amino acid sequence set forth in SEQ ID NO: 228. In a further embodiment, the one or more nucleic acid molecule encoding an enzyme having 3-phosphoglycerate dehydrogenase activity, an enzyme having 3-phospho-hydroxypyruvate reductase activity, or an enzyme having 2-oxoglutarate reductase activity is encoded by a nucleic acid sequence set forth in SEQ ID NO: 227.

### Phosphoserine Aminotransferase, Serine Aminotransferase, L-Serine Transaminase (EC 2.6.1.52)

[0611] The present disclosure describes enzymes that can catalyze the following reactions:

[0612] 3-phospho-L-serine+2-oxoglutarate↔L-glutamate+3-phospho-hydroxypyruvate

[0613] (3R)-3-hydroxy-2-oxo-4 phosphonooxybutanoate+L-glutamate↔4-phospho-hydroxy-L-threonine+2-oxoglutarate

[0614] 2-oxoglutarate+N-succinyl-L,L-2,6-diaminopimelate↔L-glutamate+N-succinyl-2-amino-6-ketopimelate

[0615] Phosphoserine aminotransferase may also be known as phosphoserine transaminase; PSAT; 3-phosphoserine aminotransferase; hydroxypyruvic phosphate-glutamic transaminase; L-phosphoserine aminotransferase; phosphohydroxypyruvate transaminase; phosphohydroxypyruvic-glutamic transaminase; 3-O-phospho-L-serine:2-oxoglutarate aminotransferase; SerC; PdxC; 3PHP transaminase

[0616] The serC-encoded enzyme, phosphoserine/phosphohydroxythreonine aminotransferase, functions in the biosythesis of both serine and pyridoxine, by using different substrates. Pyridoxal 5′-phosphate is a cofactor for both enzyme activities, suggesting that it can act in an autocatalytic fashion, stimulating its own biosynthesis.

[0617] The redundancy and promiscuity among aminotransferase enzymes has been investigated. No activity could be observed with non-phosphorylated substrates; however, 3-hydroxypyruvate was able to be used as the substrate for an assay of SerC enzymatic activity. In addition, genetic experiments showed that SerC is a minor alanine transaminase.

[0618] The normal activities of two enzymes, ArgD and SerC, are sufficient for succinyldiaminopimelate (SDAP) and lysine biosynthesis; a third enzyme, AstC, is sufficient for SDAP biosynthesis, but alone can not fulfill the cell's requirement for lysine. Additional enzymes, including GabT and PuuE, may be able to contribute to SDAP biosynthesis. Expression of argD, astC, serC, aspC, gabT, hisC, ilvE, patA, puuE, or tyrB from a plasmid allows growth of the triple AargD serC astC mutant on minimal medium.

[0619] Crystal structures of the enzyme in the unligated form and in complex with the substrate analog α-methyl-L-glutamate have been solved, and a molecular reaction mechanism was proposed.

[0620] serC is essential for growth on glycerol minimal medium; the growth defect can be rescued by addition of serine and pyridoxol/pyridoxine.

[0621] In some embodiments, the enzyme having phosphoserine aminotransferase activity can be an enzyme having L-serine transaminase activity or an enzyme having serine aminotransferase activity. In some embodiments, an enzyme having phosphoserine aminotransferase activity, an enzyme having L-serine transaminase activity or an enzyme having serine aminotransferase activity catalyzes the conversion of L-serine to hydroxypyruvate. In some embodiments, the enzyme having phosphoserine aminotransferase activity, the enzyme having L-serine transaminase activity or the enzyme having serine aminotransferase activity is encoded by an amino acid sequence having at least 70% sequence identity, having at least 80% sequence identity, or having at least 90% sequence identity to serC. In some embodiments, the enzyme having phosphoserine aminotransferase activity, the enzyme having L-serine transaminase activity or the enzyme having serine aminotransferase activity is serC.

[0622] In some embodiments, the one or more nucleic acid molecules encoding the enzyme having phosphoserine aminotransferase activity is serC, or homolog thereof. In another embodiment, the one or more nucleic acid molecules encoding an enzyme having phosphoserine aminotransferase activity, an enzyme having L-serine transaminase activity, or an enzyme having serine aminotransferase activity comprise an amino acid sequence set forth in SEQ ID NO: 230. In a further embodiment, the one or more nucleic acid molecule encoding an enzyme having phosphoserine aminotransferase activity, an enzyme having L-serine transaminase activity or an enzyme having serine aminotransferase activity is encoded by a nucleic acid sequence set forth in SEQ ID NO: 229.

3-phospho-hydroxypyruvate Phosphatase

[0623] The present disclosure describes enzymes that can catalyze the following reaction:

[0624] 3-phospho-hydroxypyruvate+H₂O→hydroxypyruvate+phosphate

[0625] YeaB (NudL) belongs to the Nudix family of hydrolases and was predicted to have CoA pyrophosphohydrolase activity.

[0626] yeaB (nudL) was isolated as a multicopy suppressor of the repression of flhDC transcription in a pgsA mutant. The suppression may be due to the reduction of σ^{S} expression in cells that overexpress nudL.

[0627] yeaB (nudL) was also isolated as a multicopy suppressor of the PLP auxotrophy of a pdxB deletion strain. NudL was found to be part of a serendipitous metabolic pathway that produces an intermediate of the pyridoxal 5′-phosphate biosynthesis I pathway, 4-phospho-hydroxy-L-threonine, that lies downstream of PdxB. The pathway diverts 3-phosphohydroxypyruvate from serine biosynthesis. With a K_{cat} of 5.7×10⁻⁵, NudL is an inefficient catalyst of the conversion of 3-phosphohydroxypyruvate to hydroxypyruvate, but its activity appears to be sufficient for production of PLP.

[0628] In some embodiments, the enzyme having 3-phospho-hydroxypyruvate phosphatase activity is encoded by an amino acid sequence having at least 70% sequence identity, having at least 80% sequence identity, or having at least 90% sequence identity to yeaB. In some embodiments, the enzyme having 3-phospho-hydroxypyruvate phosphatase activity is yeaB.

[0629] In some embodiments, the one or more nucleic acid molecules encoding the enzyme having 3-phospho-hydroxypyruvate phosphatase activity is yeaB, or homolog thereof. In another embodiment, the one or more nucleic acid molecules encoding an enzyme having 3-phospho-hydroxypyruvate phosphatase activity comprise an amino acid sequence set forth in SEQ ID NO: 232. In a further embodiment, the one or more nucleic acid molecule encoding an enzyme having 3-phospho-hydroxypyruvate phosphatase activity is encoded by a nucleic acid sequence set forth in SEQ ID NO: 231.

### Phosphoserine Phosphatase (EC 3.1.3.3)

[0630] The present disclosure describes enzymes that can catalyze the following reaction:

[0631] 3-phospho-L-serine+H₂O→L-serine+phosphate

[0632] Phosphoserine phosphatase catalyzes the last step in serine biosynthesis. The enzyme belongs to the superfamily of haloacid dehalogenase (HAD)-like hydrolases. Enzymatic studies were originally performed using partially purified enzyme from E. coli strain W; assays of the purified enzyme were performed as part of an investigation of the HAD superfamily of enzymes.

[0633] serB is essential for growth on glycerol minimal medium; the growth defect can be rescued by addition of serine. Gph, HisB and YtjC were identified as multicopy suppressors of the conditional AserB phenotype. Directed evolution experiments identified mutations that increased fitness and enzymatic activity of these suppressors.

[0634] In some embodiments, the enzyme having phosphoserine phosphatase activity is encoded by an amino acid sequence having at least 70% sequence identity, having at least 80% sequence identity, or having at least 90% sequence identity to serB. In some embodiments, the enzyme having phosphoserine phosphatase activity is serB.

[0635] In some embodiments, the one or more nucleic acid molecules encoding the enzyme having phosphoserine phosphatase activity is serB, or homolog thereof. In another embodiment, the one or more nucleic acid molecules encoding an enzyme having phosphoserine phosphatase activity comprise an amino acid sequence set forth in SEQ ID NO: 234. In a further embodiment, the one or more nucleic acid molecule encoding an enzyme having phosphoserine phosphatase activity is encoded by a nucleic acid sequence set forth in SEQ ID NO: 233.

### Serine-Pyruvate Aminotransferase (EC 2.6.1.51)

[0636] The present disclosure describes enzymes that can catalyze the following reactions:

[0637] pyruvate+L-serine↔L-alanine+hydroxypyruvate

[0638] glyoxylate+L-alanine↔glycine+pyruvate

[0639] Serine-pyruvate aminotransferase may also be known as alanine-glyoxylate aminotransferase.

[0640] The peroxisomal serine-pyruvate aminotransferase (AGXT1) and mitochondrially localized alanine-glyoxylate aminotransferase 2 (AGXT2) both catalyze the conversion of glyoxylate to glycine using alanine as the amino donor. Unlike AGXT2, AGXT1 cannot utilize asymmetric dimethylarginine (ADMA) as an amino donor.

[0641] Peroxisomal serine-pyruvate aminotransferase is a pyridoxal phosphate dependent liver specific enzyme composed of a homodimer. Its location in the peroxisome is crucial for proper enzyme activity. A peroxisomal targeting sequence (PTS1) at the C-terminus is required for translocation into peroxisomes.

[0642] Dysfunction or mistargeting of serine-pyruvate aminotransferase leading to absence in hepatic peroxisomes, causes glyoxylate to escape into the cytosol where it is further metabolized to oxalate and glycolate. Oxalate cannot be further metabolized in humans and leads to the formation of insoluble calcium oxalate in the kidney and urinary tract. Mutations in the AGXT1 gene leads to improper peroxisomal targeting and causes the autosomal recessive metabolic disorder, primary hyperoxaluria type 1, which results in irreversible kidney damage. One-third of primary hyperoxaluria type 1 patients have a unique protein sorting defect in which the hepatic peroxisomal enzyme is mistargeted to the mitochondria.

[0643] In some embodiments, the enzyme having serine-pyruvate aminotransferase activity is encoded by an amino acid sequence having at least 70% sequence identity, having at least 80% sequence identity, or having at least 90% sequence identity to Homo sapiens AGXT1. In some embodiments, the enzyme having serine-pyruvate aminotransferase activity is Homo sapiens AGXT1.

[0644] In some embodiments, the one or more nucleic acid molecules encoding the enzyme having serine-pyruvate aminotransferase activity is AGXT1, or homolog thereof. In some embodiments, the one or more nucleic acid molecules encoding an enzyme having serine-pyruvate aminotransferase activity comprise an amino acid sequence set forth in SEQ ID NO: 244. In a further embodiment, the one or more nucleic acid molecule encoding an enzyme having serine-pyruvate aminotranserase activity is encoded by a nucleic acid sequence set forth in SEQ ID NO: 243.

### Serine Decarboxylase (EC 4.1.1.65)

[0645] The present disclosure describes enzymes that can catalyze the following reaction:

[0646] a 3-O-sn-phosphatidyl-L-serine+H+→an L-1-phosphatidylethanolamine+CO₂

[0647] Serine decarboxylase may also be known as phosphatidylserine decarboxylase; PS decarboxylase; phosphatidyl-L-serine carboxy-lyase.

[0648] Phosphatidylserine decarboxylase is one of a small class of enzymes that use a covalently bound pyruvoyl prosthetic group. The pyruvoyl group is thought to act analogously to pyridoxal phosphate cofactor by forming a Schiff base with the amino group of the substrate and then serving as an electron sink to facilitate the decarboxylation.

[0649] Four of these enzymes, histidine decarboxylase (E.C. 4.1.1.22), phosphatidylserine decarboxylase, aspartate 1-decarboxylase, and S-adenosylmethionine decarboxylase are decarboxylases forming important biological amines. All of these enzymes are known to have the pyruvoyl prosthetic group attached via an amide linkage to the amino terminus of the α subunit. Two other enzymes in this group are are D-proline reductase and glycine reductase (E.C. 1.21.4.2).

[0650] Pyruvoyl-containing enzymes are expressed as a zymogen which is processed post-translationally by a self-maturation cleavage called serinolysis. In this process the pyruvoul group is formed from a serine residue, splitting the presursor protein into two parts which become the α and β subunits. In some cases additional subunits may be involved.

[0651] This enzyme differs from other pyruvoyl-dependent decarboxylases composed of nonidentical subunits in that the pyruvate prosthetic group is associated with the smaller subunit. The enzyme is a multimer of unknown number of the heterodimer.

[0652] In some embodiments, an enzyme having serine decarboxylase activity catalyzes the conversion of L-serine to ethanolamine.

[0653] In some embodiments, the enzyme having serine decarboxylase activity is encoded by an amino acid sequence having at least 70% sequence identity, having at least 80% sequence identity, or having at least 90% sequence identity to Arabidopsis thaliana SDC. In some embodiments, the enzyme having serine decarboxylase activity is Arabidopsis thaliana SDC.

[0654] In some embodiments, the one or more nucleic acid molecules encoding the enzyme having serine decarboxylase activity is SDC, or homolog thereof. In some embodiments, the one or more nucleic acid molecules encoding an enzyme having serine decarboxylase activity comprise an amino acid sequence set forth in SEQ ID NO: 236. In a further embodiment, the one or more nucleic acid molecule encoding an enzyme having serine decarboxylase activity is encoded by a nucleic acid sequence set forth in SEQ ID NO: 235.

### Ethanolamine Oxidoreductase (Deaminating) (EC 1.4.3.8), Ethanolamine Aminotransferase (EC 2.6.1.-)

[0655] The present disclosure describes enzymes that can catalyze the following reactions:

[0656] ethanolamine+oxygen+H₂O→ammonium+hydrogen peroxide+glycolaldehyde

[0657] ethanolamine+2-oxoglutarate→glycolaldehyde+L-glutamate

[0658] Ethanolamine oxidoreductase (deaminating) may also be known as ethanolamine oxidase. This enzyme belongs to the family of oxidoreductases, specifically those acting on the CH—NH₂ group of donors with oxygen as acceptor.

[0659] In some embodiments, an ethanolamine oxidase or an ethanolamine aminotransferase catalyzes the conversion of ethanolamine to gylcolaldehyde.

[0660] In some embodiments, the enzyme having ethanolamine oxidase activity is encoded by an amino acid sequence having at least 70% sequence identity, having at least 80% sequence identity, or having at least 90% sequence identity to E. coli tynA. In some embodiments, the enzyme having ethanolamine oxidase activity is E. coli tynA.

[0661] In some embodiments, the one or more nucleic acid molecules encoding the enzyme having ethanolamine oxidase activity is tynA, or homolog thereof. In some embodiments, the one or more nucleic acid molecules encoding an enzyme having ethanolamine oxidase activity comprise an amino acid sequence set forth in SEQ ID NO: 238. In a further embodiment, the one or more nucleic acid molecule encoding an enzyme having ethanolamine oxidase activity is encoded by a nucleic acid sequence set forth in SEQ ID NO: 237.

[0662] In some embodiments, the enzyme having ethanolamine aminotransferase activity is encoded by an amino acid sequence having at least 70% sequence identity, having at least 80% sequence identity, or having at least 90% sequence identity to E. coli alaA. In some embodiments, the enzyme having ethanolamine aminotransferase activity is E. coli alaA.

[0663] In some embodiments, the one or more nucleic acid molecules encoding the enzyme having ethanolamine aminotransferase activity is alaA, or homolog thereof. In some embodiments, the one or more nucleic acid molecules encoding an enzyme having ethanolamine aminotransferase activity comprise an amino acid sequence set forth in SEQ ID NO: 240. In a further embodiment, the one or more nucleic acid molecule encoding an enzyme having ethanolamine aminotransferase activity is encoded by a nucleic acid sequence set forth in SEQ ID NOs: 239.

### Hydroxypyruvate Reductase (EC 1.1.1.-)

[0664] The present disclosure describes enzymes that can catalyze the following reactions:

[0665] D-glycerate+NAD(P)+↔hydroxypyruvate+NAD(P)H+H+

[0666] Hydroxypyruvate reductase may also be known as beta-hydroxypyruvate reductase; NADH:hydroxypyruvate reductase; D-glycerate dehydrogenase.

[0667] Hydroxypyruvate reductase is an enzyme found in higher plants, algae, mammalian tissues and bacteria. In most cases it has been postulated to convert hydroxypyruvate to glycerate. However, most enzymes also carry the reduction of glyoxylate to glycolate.

[0668] In the serine cycle methylotrophs, hydroxypyruvate reductase plays a key role in the assimilation of carbon. It catalyzes the conversion of hydroxypyruvate to glycerate, a key step of the serine cycle, but it also plays an important role in the metabolism of C2 compounds, by interconverting glyoxylate and glycolate.

[0669] In some embodiments, hydroxypyruvate reductase catalyzes the conversion of glycerate to hydroxypyruvate.

[0670] In some embodiments, the enzyme having hydroxypyruvate reductase activity is encoded by an amino acid sequence having at least 70% sequence identity, having at least 80% sequence identity, or having at least 90% sequence identity to E. coli ghrB. In some embodiments, the enzyme having hydroxypyruvate reductase activity is E. coli ghrB.

[0671] In some embodiments, the one or more nucleic acid molecules encoding the hydroxypyruvate reductase is ghrB, or homolog thereof. In some embodiments, the one or more nucleic acid molecules encoding an enzyme having hydroxypyruvate reductase activity comprise an amino acid sequence set forth in SEQ ID NO: 242. In a further embodiment, the one or more nucleic acid molecule encoding an enzyme having hydroxypyruvate reductase activity is encoded by a nucleic acid sequence selected from the group consisting of SEQ ID NO: 241.

### Glycerate Decarboxylase

[0672] The present disclosure describes enzymes that can catalyze the following reaction:

[0673] D-glycerate+H+→ethylene glycol+CO₂

[0674] In some embodiments, an enzyme having glycerate decarboxylase activity catalyzes the conversion of glycerate to ethylene glycol.

### 3-Phosphoglycerate Phosphatase (EC 3.1.3.38) or 2-Phosphoglycerate Phosphatase (EC 3.1.3.20)

[0675] The present disclosure describes enzymes that can catalyze the following reaction:

[0676] 3-phospho-D-glycerate+H₂O→D-glycerate+phosphate

[0677] 2-phospho-D-glycerate+H2O→D-glycerate+phosphate

[0678] 3-phosphoglycerate phosphatase may also be known as D-3-phosphoglycerate phosphatase; 3-PGA phosphatase. 2-phosphoglycerate phosphatase may also be known as D-2-phosphoglycerate phosphatase; 2-PGA phosphatase. These enzymes belong to the family of hydrolases, specifically those acting on phosphoric monoester bonds.

[0679] In some embodiments, the enzyme having 3-phosphoglycerate phosphatase activity or the enzyme having 2-phosphoglycerate phosphatase activity is encoded by an amino acid sequence having at least 70% sequence identity, having at least 80% sequence identity, or having at least 90% sequence identity to E. coli phoA. In some embodiments, the enzyme having 3-phosphoglycerate phosphatase activity or enzyme having 2-phosphoglycerate phosphatase activity is E. coli phoA.

[0680] In some embodiments, the one or more nucleic acid molecules encoding the enzyme having 3-phosphoglycerate phosphatase activity or enzyme having 2-phosphoglycerate phosphatase activity is phoA, or homolog thereof. In some embodiments, the one or more nucleic acid molecules encoding an enzyme having 3-phosphoglycerate phosphatase activity or enzyme having 2-phosphoglycerate phosphatase activity comprise an amino acid sequence set forth in SEQ ID NO: 246. In a further embodiment, the one or more nucleic acid molecule encoding an enzyme having 3-phosphoglycerate phosphatase activity or enzyme having 2-phosphoglycerate phosphatase activity is encoded by a nucleic acid sequence set forth in SEQ ID NO: 245.

### Glycerate Kinase (EC 2.7.1.31)

[0681] The present disclosure describes enzymes that can catalyze the following reaction:

[0682] D-glycerate+ATP↔3-phospho-D-glycerate+ADP+H+

[0683] D-glycerate+ATP↔2-phospho-D-glycerate+ADP+H+

[0684] Glycerate kinase may also be known as glycerate 3-kinase; glycerate kinase (phosphorylating) (ambiguous); D-glycerate 3-kinase; D-glycerate kinase (ambiguous); glycerate-kinase (ambiguous); GK (ambiguous); D-glyceric acid kinase (ambiguous); ATP: (R)-glycerate 3-phosphotransferase.

[0685] This enzyme belongs to the family of transferases, specifically those transferring phosphorus-containing groups (phosphotransferases) with an alcohol group as acceptor. This enzyme participates in 3 metabolic pathways: serine/glycine/threonine metabolism, glycerolipid metabolism, and glyoxylate-dicarboxylate metabolism.

[0686] In some embodiments, an enzyme having glycerate kinase activity catalyzes the conversion of 3-phosphoglycerate to glycerate. In other embodiments, an enzyme having glycerate kinase activity catalyzes the conversion of 2-phosphoglycerate to glycerate.

[0687] In some embodiments, the enzyme having glycerate kinase activity is a glycerate 3-kinase. In some embodiments, the enzyme having glycerate 3-kinase activity is encoded by an amino acid sequence having at least 70% sequence identity, having at least 80% sequence identity, or having at least 90% sequence identity to Arabidopsis thaliana GLYK. In some embodiments, the glycerate 3-kinase is Arabidopsis thaliana GLYK.

[0688] In some embodiments, the one or more nucleic acid molecules encoding the enzyme having glycerate 3-kinase activity is GLYK, or homolog thereof. In some embodiments, the one or more nucleic acid molecules encoding an enzyme having glycerate 3-kinase activity comprise an amino acid sequence set forth in SEQ ID NO: 248. In a further embodiment, the one or more nucleic acid molecule encoding an enzyme having glycerate 3-kinase activity is encoded by a nucleic acid sequence set forth in SEQ ID NO: 247.

[0689] In some embodiments, the enzyme having glycerate kinase activity is an enzyme having glycerate 2-kinase activity. In some embodiments, the enzyme having glycerate 2-kinase activity is encoded by an amino acid sequence having at least 70% sequence identity, having at least 80% sequence identity, or having at least 90% sequence identity to E. coli glxK. In some embodiments, the enzyme having glycerate 2-kinase activity is encoded by an amino acid sequence having at least 70% sequence identity, having at least 80% sequence identity, or having at least 90% sequence identity to E. coli garK. In other embodiments, the enzyme having glycerate 2-kinase activity is E. coli glxK. In some embodiments, the glycerate 2-kinase is E. coli garK.

[0690] In some embodiments, the one or more nucleic acid molecules encoding the enzyme having glycerate 2-kinase activity is glxK, or homolog thereof. In some embodiments, the one or more nucleic acid molecules encoding the enzyme having glycerate 2-kinase activity is garK, or homolog thereof. In some embodiments, the one or more nucleic acid molecules encoding an enzyme having glycerate 2-kinase activity comprise an amino acid sequence selected from SEQ ID NOs: 250 and 252. In a further embodiment, the one or more nucleic acid molecule encoding an enzyme having glycerate 2-kinase activity is encoded by a nucleic acid sequence selected from SEQ ID NOs: 249 and 251.

Transferase that Transfers One-Carbon Group (EC 2.1.2.-)

[0691] The present disclosure describes enzymes that can catalyze the following reaction:

[0692] M-THF+H2O↔THF+formaldehyde

[0693] Transferases such as the hydroxymethyl-, formyl- and related transferases may be used. Examples of hydroxymethyl-, formyl- and related transferases include glycine hydroxymethyltransferase, phosphoribosylglycinamide formyltransferase, phosphoribosylaminoimidazolecarboxamide formyltransferase, glycine formimidoyltransferase, glutamate formiminotransferase, D-alanine 2-hydroxymethyltransferase, deoxycytidylate 5-hydroxymethyltransferase, methionyl-tRNA formyltransferase, aminomethyltransferase, 3-methyl-2-oxobutanoate hydroxymethyltransferase and UDP-4-amino-4-deoxy-L-arabinose formyltransferase.

### Serine Hydroxymethyltransferase (EC 2.1.2.1)

[0694] The present disclosure describes enzymes that can catalyze the following reaction:

[0695] L-serine+tetrahydrofolate (THF)↔Glycine+5,10-methylenetetrahydrofolate (M-THF)

[0696] Serine hydroxymethyltransferase (GlyA) converts serine to glycine, transferring a methyl group to tetrahydrofolate, thus forming 5,10-methylene-tetrahydrofolate (M-THF). M-THF is the major source of C1 units in the cell, making GlyA a key enzyme in the biosynthesis of purines, thymidine, methionine, choline and lipids.

[0697] The enzyme also catalyzes several side reactions including hydrolysis of 5,10-methenylTHF to 5-formylTHF and the reversible cleavage of 3-hydroxy amino acids (L-threonine, allothreonine, 3-phenylserine) to glycine and an aldehyde. D-alanine inactivates the enzyme by reacting with the pyridoxal phosphate prosthetic group to form pyridoxamine phosphate.

[0698] The Thr226 residue within a conserved region of the enzyme appears to be involved in substrate discrimination. The His228 residue plays a role in determining reaction specificity. Lys229 does not appear to play a catalytic role. Arg363 appears to be the binding site for the carboxyl group of the amino acid substrate. The hydroxyl group of Tyr65 may be involved in the conversion of the active site from a closed to an open conformation. Both Tyr55 and Arg235 are required for the transaldimination reaction.

[0699] Studies on refolding of the enzyme indicate that pyridoxal 5′-phosphate (PLP) only binds to the dimeric apoenzyme at the end of the folding pathway. The mechanism of PLP addition has been investigated further. At high concentrations of PLP, a second molecule of PLP can bind at Lys346. A conserved hydrophobic contact area is involved in stability of the PLP binding site. Tyr55 is required for correct positioning of the PLP cofactor.

[0700] Crystal structures of wild type and mutant serine hydroxymethyltransferase have been solved.

[0701] glyA mutants cannot use glycine as the sole source of nitrogen. A glyA mutant is auxotrophic for glycine; glyA was later shown to be essential for growth on glycerol minimal medium.

[0702] Sequences 3′ to the structural gene within the glyA mRNA are required for mRNA stability.

[0703] In some embodiments, the enzyme having serine hydroxymethyltransferase activity is encoded by an amino acid sequence having at least 70% sequence identity, having at least 80% sequence identity, or having at least 90% sequence identity to E. coli glyA. In some embodiments, the one or more nucleic acid molecule encoding an enzyme having serine hydroxymethyltransferase comprises an amino acid sequence set forth in UniProt ID P0A825. In a further embodiment, the one or more nucleic acid molecule encoding an enzyme having serine hydroxymethyltransferase is encoded by a nucleic acid sequence set forth in Gene ID 947022.

### Formaldehyde Dehydrogenase (EC 1.2.1.46 and EC 1.2.1.-)

[0704] The present disclosure describes enzymes that can catalyze the following reaction:

[0705] Formaldehyde+NAD⁺+H2O→formate+NADH+2 H⁺

[0706] Formaldehyde dehydrogenase may also be known as NAD-linked formaldehyde dehydrogenase, NAD-dependent formaldehyde dehydrogenase or formaldehyde:NAD⁺ oxidoreductase.

[0707] Most of the formaldehyde dehydrogenases found in animals, plants and bacteria belong to a group called class III alcohol dehydrogenase group and require the addition of glutathione for activity. As a matter of fact, the true substrate for these enzymes was shown to be not formaldehyde, but S-hydroxymethylglutathione, which is formed nonenzymatically from formaldehyde and glutathione.

[0708] Unlike those enzymes, the enzyme isolated from Pseudomonas putida catalyzes the irreversible oxidation of formaldehyde to formate without the addition of glutathione. Since its substrate is formaldehyde, in an essence this is the “genuine” formaldehyde dehydrogenase. Like other formaldehyde dehydrogenases, the P. putida FDH is a zinc-containing metalloenzyme. It also requires NAD⁺ as the electron acceptor. However, unlike the enzymes that belong to the class III alcohol dehydrogenase group, it is sensitive to 4-methylpyrazole. In one embodiment, the formaldehyde dehydrogenase is from Pseudomonas putida. In some embodiments, the formaldehyde dehydrogenase is encoded by an amino acid sequence having at least 70% sequence identity, having at least 80% sequence identity, or having at least 90% sequence identity to P. putida fdhA. In some embodiments, the one or more nucleic acid molecule encoding a formaldehyde dehydrogenase comprises an amino acid sequence set forth in GenBank Accession BAA04743.1. In a further embodiment, the one or more nucleic acid molecule encoding a formaldehyde dehydrogenase is encoded by a nucleic acid sequence set forth in GenBank Accession D21201.1.

[0709] In the industrially important actinomycete Corynebacterium glutamicum ATCC 13032, evidence suggests that two enzymes contribute to the degradation of toxic formaldehyde, mycothiol-dependent formaldehyde dehydrogenase encoded by gene fadH, and to a lesser extent acetaldehyde dehydrogenase encoded by gene ald (acetaldehyde dehydrogenase). A mutant lacking both of these enzymes was unable to grow in formaldehyde-containing medium. It also did not grow in vanillate-containing medium because the oxidation of vanillate produces intracellular formaldehyde. Detoxification of formaldehyde is necessary when this soil bacterium encounters formaldehyde in its habitat, or when formaldehyde is generated during metabolism of environmental compounds such as vanillate. The formate produced by FadH can be further oxidized to CO2 by the formate dehydrogenase encoded by gene fdhF.

[0710] An ald mutant showed a reduction in formaldehyde degradation of about 30% as compared with wild-type. Inactivation of the chromosomal ald gene resulted in loss of acetaldehyde dehydrogenase activity and loss of the ability of this organism to grow on or utilize ethanol, suggesting a two step oxidation of ethanol to acetate. Expression of gene ald is dependent on the transcriptional regulator RamA, whereas RamB has a slightly negative effect on expression. In one embodiment, the formaldehyde dehydrogenase is from Corynebacterium glutamicum ATCC 13032. In some embodiments, the formaldehyde dehydrogenase is encoded by an amino acid sequence having at least 70% sequence identity, having at least 80% sequence identity, or having at least 90% sequence identity to Corynebacterium glutamicum ATCC 13032 ald. In some embodiments, the one or more nucleic acid molecule encoding a formaldehyde dehydrogenase comprises an amino acid sequence set forth in UniProt ID Q8NLZ0. In a further embodiment, the one or more nucleic acid molecule encoding a formaldehyde dehydrogenase is encoded by a nucleic acid sequence set forth in Gene ID 1020739.

[0711] In some embodiments, the enzyme having formaldehyde dehydrogenase activity is encoded by an amino acid sequence having at least 70% sequence identity, having at least 80% sequence identity, or having at least 90% sequence identity to Pseudomonas oleovorans alkH.

[0712] In Saccharomyces cerevisiae, two tandem-repeated genes ALD2 and ALD3 encode two cytoplasmic stress-inducible isoforms of aldehyde dehydrogenase. The expression of these isoforms is dependent on the general-stress transcription factors Msn2 and Msn4 but is independent of the HOG MAP kinase pathway. Both forms can use the cofactor NAD+ much more efficiently that NADP+, and are not activated by any cations. While ALD3 is induced by a variety of stresses, including osmotic shock, heat shock, glucose exhaustion, oxidative stress and drugs, ALD2 is only induced by osmotic stress and glucose exhaustion.

[0713] In some embodiments, the enzyme having formaldehyde dehydrogenase activity is encoded by an amino acid sequence having at least 70% sequence identity, having at least 80% sequence identity, or having at least 90% sequence identity to Saccharomyces cerevisiae ALD2. In other embodiments, the enzyme having formaldehyde dehydrogenase activity is encoded by an amino acid sequence having at least 70% sequence identity, having at least 80% sequence identity, or having at least 90% sequence identity to Saccharomyces cerevisiae ALD3. In some embodiments, the one or more nucleic acid molecule encoding an enzyme having formaldehyde dehydrogenase activity comprises an amino acid sequence selected from UniProt ID P47771 and UniProt ID P54114. In a further embodiment, the one or more nucleic acid molecule encoding an enzyme having formaldehyde dehydrogenase activity is encoded by a nucleic acid sequence selected from Gene ID 855206 and Gene ID 855205.

[0714] In some embodiments, the enzyme having formaldehyde dehydrogenase activity is encoded by an amino acid sequence having at least 70% sequence identity, having at least 80% sequence identity, or having at least 90% sequence identity to Homo sapiens ALDH3A2. In other embodiments, the enzyme having formaldehyde dehydrogenase activity is encoded by an amino acid sequence having at least 70% sequence identity, having at least 80% sequence identity, or having at least 90% sequence identity to Homo sapiens ALDH9A1. In some embodiments, the one or more nucleic acid molecule encoding an enzyme having formaldehyde dehydrogenase activity comprises an amino acid sequence selected from UniProt ID P51648 and UniProt ID P49189. In a further embodiment, the one or more nucleic acid molecule encoding an enzyme having formaldehyde dehydrogenase activity is encoded by a nucleic acid sequence selected from Gene ID 224 and Gene ID 223.

### Formate Dehydrogenase (EC 1.2.1.-)

[0715] The present disclosure describes enzymes that can catalyze the following reactions:

[0716] formate+an oxidized electron acceptor+H+→CO₂+a reduced electron acceptor

[0717] formate+H+→CO₂+H₂ (catalyzed by complex)

[0718] formate+an oxidized hydrogenase 3→CO₂+a reduced hydrogenase 3

[0719] Formate dehydrogenase-H is one of three membrane-associated formate dehydrogenase isoenzymes in E. coli. All are functional in the anaerobic metabolism of the organism.

[0720] Formate dehydrogenase-H (FDH-H) is located in the cytoplasm and together with hydrogenase-3, FDH-H forms the formate-hydrogen lyase complex. The enzyme is oxygen sensitive and contains selenium as selenocysteine incorporated cotranslationally at the position of an in-frame UGA stop codon in the FdhF open reading frame. A crystal structure of FDH-H has been solved at 2.3 Å resolution, confirming the presence of a [4Fe-4S] cluster, coordination of the Mo cofactor by selenocysteine, and the position of the binding site for the inhibitor nitrate. Expression of fdhF is induced by formate and the absence of external electron acceptors, and is repressed by nitrate, nitrite, trimethylamine N-oxide, and oxygen. Formate can overcome repression by nitrate but not by oxygen. Inhibition of DNA gyrase enhances expression of fdhF.

[0721] fdnGHI encodes membrane bound formate dehydrogenase N (FDH-N)—a respiratory enzyme that catalyses the oxidation of formate to carbon dioxide, donating electrons to the quinone pool for the reduction of anaerobic respiratory substrates such as nitrate and trimethylamine N-oxide. FDH-N is a member of the complex iron sulfur molybdoenzyme (CISM) family. The oxidation of formate by FDH-N is electrogenic (H+/e−=1); oxidation of formate in the periplasm is accompanied by menaquinone reduction at the cytoplasmic face of the inner membrane. Expression of formate dehydrogenase-N is induced by nitrate and anaerobiosis, mediated by NarL and Fnr, respectively. Purified FDH-N contains three subunits, designated α (FdnG), β (FdnH) and γ (FdnI). A crystal structure, resolved at 1.6 Å, indicates that this subcomplex is further organised into physiologically relevant trimers with the α and β subunits located towards the periplasmic face of the inner membrane and the γ subunits located towards the cytoplasm. Electrons are transferred from the site of formate oxidation in the α subunit across the membrane to the site of menaquinone reduction in the γ subunit. Protons are taken up from the cytoplasm at the menaquinone reduction site.

[0722] fdoGHI encodes formate dehydrogenase O (FDH-O)—a respiratory molybdoenzyme that catalyses the oxidation of formate to carbon dioxide, donating electrons to the membrane soluble quinone pool for the reduction of nitrate. FDH-O and nitrate reductase Z participate in a formate to nitrate electron transport pathway that is active when cells are shifted from aerobic to anaerobic conditions. The pathway operates with either menaquinone or ubiquinone. FDH-O appears to be expressed constitutively; unlike formate dehydrogenase N (FDH-N), it is not regulated by Fnr or NarL. Expression of FDH-O is increased under aerobic conditions; under anaerobic conditions, nitrate stimulates expression slightly; the global regulators H-NS and CRP may play a role in regulation of FDH-O expression. FDH-O may contribute to the cells ability to rapidly adapt to anaerobiosis while levels of FDH-N are still insufficient. FDH-O is a heterotrimeric complex consisting of an α (FdoG), a β (FdoH) and a γ (FdoI) subunit—it shares extensive sequence similarity and immunological properties with the anaerobically expressed FDH-N.

[0723] Candida boidinii formate dehydrogenase FDH1 is an NAD-dependent enzyme that mediates the detoxification of formate and is strongly inhibited by Cu²⁺, Hg, p-chloromercuribenzoate, cyanide, azide, thiocyanate and cyanate. The inhibition of cyanide is reversible and competes with formate. Protein expression is induced by methanol and repressed by glucose. Since the enzymatic reaction catalyzed by this formate dehydrogenase can regenerate NADH, it has been cloned into E. coli to optimize NADH requiring engineered pathways.

[0724] In the industrially important actinomycete Corynebacterium glutamicum ATCC 13032 evidence suggests that a formate dehydrogenase catalyzes the oxidation of formate to CO₂. Both formate and toxic formaldehyde are present in the environment and can be dissimilated by this soil bacterium via the oxidation of formaldehyde to formate. This can be accomplished via FadH and Ald. Formate is then converted to CO₂ by FdhF. FdhF is a molybdenum cofactor-dependent formate dehydrogenase that is active under oxic conditions, and was speculated to be involved in the stress response. The exact electron acceptor used by FdhF has not been defined. Gene fdhF is part of a gene cluster containing related genes fdhD and cg0617 that were shown by mutant analysis to be required for formate dehydrogenase activity. The growth of Corynebacterium glutamicum ATCC 13032 is inhibited to some extent in the presence of formate and strains lacking formate dehydrogenase activity show increased inhibition. Radiotracer experiments showed that when Corynebacterium glutamicum ATCC 13032 was grown with glucose and ¹³C-formate, it was metabolized to ¹³C-carbon dioxide. An fdhF deletion mutant could not metabolize formate. Growth studies also demonstrated the requirement for Mo²⁺. Protein sequence analysis suggested that FdhF is not an integral membrane protein, but is likely either cytosolic or membrane-associated. Putative orthologs have been identified in a variety of other soil bacteria.

[0725] When Cupriavidus oxalaticus is grown on formate as the main carbon and energy source, NAD+-dependent formate dehydrogenase is the key enzyme that generates NADH and CO₂. The latter enters the ribulose diphosphate carboxylase reaction. The enzyme has been purified to homogeneity from cells grown with formate. The enzyme is a complex flavoprotein containing 2 FMN (flavin mononucleotide), 18-25 non-heme iron atoms and 15-20 acid-labile sulfides. The specific activity was 42 units/mg. The enzyme is specific toward its natural substrate formate, but can accept multiple nonphysiological electron acceptors, including methylviologen, phenazine methosulfate, methylene blue, nitro blue tetrazolium salt, FMN, FAD, riboflavin, and oxygen. It has been shown that the enzyme can also catalyze the reaction in the opposite direction. However, under the conditions employed the enzyme catalyzed the oxidation of formate about 30 times faster than CO₂ reduction.

[0726] NAD+-dependent formate dehydrogenase from Gottschalkia acidurici catalyzes a reversible reaction. While it catalyzes the oxidation of formate to CO₂, it also catalyzes the reduction of the latter to formate, which is then converted to acetate. The enzyme has been partially purified and found to be a large enzyme complex (molecular weight of at least 200 kDa) that is very sensitive to oxygen and light. The enzyme contains a L-selenocysteine. Crude preparations of the enzyme could be coupled to NAD reduction during formate oxidation through ferredoxin. When the artificial electron acceptor methyl viologen was used instead of NAD, ferredoxin was not required. Cyanide inhibited the enzyme 90%. Basal formate oxidation activity in cell extracts was 0.85 μmol/min/mg protein, but increased 12-fold upon the addition of tungstate and selenite. Interestingly, the enzyme from the related organism Clostridium cylindrosporum, while having a similar requirement for selenite, requires molybdate rather than tungstate, which has an antagonistic effect on it.

[0727] The tungsten-containing NAD+-dependent formate dehydrogenase from Methylobacterium extorquens is a heterodimer containing iron-sulfur clusters, FMN and tungsten. It is somewhat unusual to find a tungsten-containing enzyme in aerobic bacteria, although several other examples have been found. The smaller β subunit appears to be a fusion protein, with its N-terminal domain related to NueE-like subunits, and its C-terminal domain related to NuoF-like subunits of known NADH-ubiquinone oxidoreductases.

[0728] Two different forms of formate dehydrogenase FDH have been purified from Methylosinus trichosporium OB3b independently by two groups, and the two proteins were found to have different properties. This protein is composed of two types of subunits in an apparent α2β₂ arrangement, with a total size of 315 kDa. It contains nonheme iron and sulfide, and no other metals, and appeared to require FMN.

[0729] The Moraxella sp. NAD+-dependent formate dehydrogenase fdh is a relatively simple dimeric protein, with no prosthetic groups.

[0730] In some embodiments, the enzyme having formate dehydrogenase activity is encoded by an amino acid sequence having at least 70% sequence identity, having at least 80% sequence identity, or having at least 90% sequence identity to a formate dehydrogenase selected from the group consisting of E. coli fdhF (chlF, FDH-H), E. coli FDH-N, E. coli FDH-O, Candida boidinii FDH1, Corynebacterium glutamicum fdhF, Cupriavidus oxalaticus NAD+-dependent formate dehydrogenase, Gottschalkia acidurici NAD+-dependent formate dehydrogenase, Methylobacterium extorquens Fdh1, Methylosinus trichosporium formate dehydrogenase, and Moraxella sp. NAD+-dependent formate dehydrogenase fdh. In some embodiments, the one or more nucleic acid molecule encoding a formate dehydrogenase or formate dehydrogenase subunit comprises an amino acid sequence selected from UniProt ID P07658, UniProt ID P0AEK7, UniProt ID P0AAJ3, UniProt ID P24183, UniProt ID P32176, UniProt ID P0AAJ5, UniProt ID P0AEL0, UniProt ID 013437, UniProt ID Q8NSY6, UniProt ID Q8KTI7, UniProt ID Q8KTI8, and UniProt ID 008375. In a further embodiment, the one or more nucleic acid molecule encoding a formate dehydrogenase or formate dehydrogenase subunit is encoded by a nucleic acid sequence selected from Gene ID 948584, Gene ID 946038, Gene ID 948794, Gene ID 946035, Gene ID 948394, Gene ID 948395, Gene ID 948383, GenBank accession AJ011046.2, Gene ID 1021531, GenBank accession AF489516, and GenBank accession Y13245.1.

### Formate Hydrogenlyase Complex

[0731] The present disclosure describes enzymes that can catalyze the following reaction:

[0732] formate+H+→CO₂+H₂ (catalyzed by complex)

[0733] The component enzymes of formate hydrogenlyase complex are: 1) formate dehydrogenase H (also known as ChlF, FdhF, FDH-H), 2) hydrogenase 3, which has multiple subunits (hycBCDEFG gene: hycB, hycC, hycD, hycE, hycF, hycG).

[0734] Formate dehydrogenase-H (FDH-H) is described above.

[0735] Microbial hydrogenases catalyse the reversible reduction of protons to molecular hydrogen. E. coli hydrogenase 3, encoded by the hyc genes (hycD, hycC, hycF, hycG, hycB and hycE), is a multisubunit enzyme that forms part of the formate hydrogenlyase (FHL) complex responsible for the fermentative or anaerobic oxidation of formic acid to carbon dioxide and molecular hydrogen.

[0736] Hydrogenase 3 functions primarily in the production of H2 and is important for H2 production at acidic pH. Hydrogen uptake in a strain lacking hydrogenase 1 and hydrogenase 2 is further reduced by the incorporation of a hycE mutation, suggesting that hydrogenase 3 can also function in hydrogen uptake. Hydrogenase 3 shows a high tolerance to product (H₂) inhibition.

[0737] Hydrogenase 3 is a membrane associated H2 evolving respiratory [NiFe] hydrogenase. It contains the large (HycE) and small (HycG) subunits that are characteristic of ‘standard’ NiFe hydrogenases plus two additional hydrophilic subunits (HycB and HycF) and two inner membrane subunits (HycC and HycD). Fe—S prosthetic groups located in the hydrophilic part of the complex may form the electron transport pathway. Isolation of FHL using affinity chromatography indicates the presence of a core complex containing HycE, HycB HycF HycG and FdhF which has formate hydrogenlyase activity in vitro; a larger complex containing the membrane associated subunits HyC and HycD is isolated in the presence of detergent.

[0738] Formate oxidation in an anaerobically grown fermenting E. coli strain lacking hydrogenase 1 and hydrogenase 2 enzymes generates membrane potential.

[0739] Sequence similarity between the genes encoding hydrogenase 3 and those encoding subunits that form the core of energy conserving NADH: quinone oxidoreductase (complex I) has been reported and an evolutionary relationship between the two has been proposed.

[0740] Strains with insertion mutations of genes within the hyc operon are defective for hydrogenase activity.

[0741] Hydrogenase 3 is a nickel containing Fe—S protein.

[0742] The hyc operon is regulated coordinately with the structural gene for formate dehydrogenase H. Expression is repressed by oxygen and by nitrate and induced by formate under fermentative growth conditions. Formate is an obligate inducer of the formate hydrogenlyase complex genes.

[0743] E. coli K-12 contains three other hydrogenases: hydrogenase 1 and hydrogenase 2 (respiratory enzymes that function in H2 uptake) and hydrogenase 4 (less well characterised; possibly silent).

[0744] In some embodiments, the hydrogenase 3 is encoded by an amino acid sequence having at least 70% sequence identity, having at least 80% sequence identity, or having at least 90% sequence identity to a hydrogenase 3 selected from the group consisting of E. coli hycB, E. coli hycC, E. coli hycD, E. coli hycE, E. coli hycF, and E. coli hycG. In some embodiments, the one or more nucleic acid molecule encoding a hydrogenase 3 or formate hydrogenlyase complex comprises an amino acid sequence selected from UniProt ID P0AAK1, UniProt ID P16429, UniProt ID P16430, UniProt ID P16431, UniProt ID P16432, and UniProt ID 16433. In a further embodiment, the one or more nucleic acid molecule encoding a formate hydrogenlyase complex or formate hydrogenlyase subunit is encoded by a nucleic acid sequence selected from Gene ID 948002, Gene ID 945327, Gene ID 948994, Gene ID 947396, Gene ID 947048, and Gene ID 947191.

### Glycine Cleavage System

[0745] The glycine cleavage system is composed of four proteins: three enzymes and a carrier protein. In animals, the system is loosely bound to the mitochondrial inner membrane. The enzymes are i) P-protein (a pyridoxal phosphate-containing protein) or glycine dehydrogenase (decarboxylating) (EC1.4.4.2), ii) T-protein or aminomethyl-transferase (EC2.1.2.10), and iii) L-protein or dihydrolipoamide dehydrogenase (EC1.8.1.4). The carrier protein is called H-protein (a lipoic acid-containing protein).

[0746] The glycine cleavage reaction catalyzes the following reversible reaction:

[0747] Glycine+THF+NAD⁺↔M-THF+CO₂+NH₃+NADH+H⁺

[0748] The system is partitioned into three partial reactions. The reaction is completely reversible, and in both glycine cleavage and glycine synthesis an aminomethyl moiety bound to the lipoic acid of H-protein represents an intermediate that is subsequently degraded to, or can be formed from, methylene-tetrahydrofolate (M-THF) and ammonia by the action of T-protein. Possibly the reaction may involve a ternary complex of P-protein, aminomethyl moiety of glycine and H-protein, as a crucial intermediary state.

[0749] Reaction Catalyzed by P-Protein

[0750] The first partial reaction of the glycine degradation is the decarboxylation catalyzed by P-protein (a glycine decarboxylase). H-protein serves as a co-substrate. One of the most characteristic properties of the glycine cleavage reaction is that, although P-protein should belong to a class of pyridoxal phosphate-dependent amino acid decarboxylases, P-protein requires H-protein to catalyze the decarboxylation of glycine significantly. The reaction proceeds via a sequential random mechanism where the carboxyl carbon of glycine is converted to carbon dioxide. The remnant of the glycine molecule is transferred to one of the sulfhydryl groups formed by the reductive cleavage of disulfide in lipoate attached to H-protein.

[0751] P-protein, a pyridoxal phosphate-containing protein of about 200 kDa, is either a homodimer or a dimer of heterodimers. The former has one molecule of pyridoxal phosphate per subunit, and the latter has one molecule of the cofactor per dimer on the β subunit. The pyridoxal cofactor is attached to a specific lysine residue. The pyridoxal cofactor interacts with the active-site pocket noncovalently. The active site of T. thermophilus P-protein is connected to the molecular surface by a channel with a broad entrance facing the solvent. The molecular surface around the channel is composed of several positively-charged amino acid residues, which are possibly involved in the complex formation with H-protein.

[0752] In some embodiments, the enzyme having glycine decarboxylase activity is encoded by an amino acid sequence having at least 70% sequence identity, having at least 80% sequence identity, or having at least 90% sequence identity to E. coli gcvP. In some embodiments, the one or more nucleic acid molecule encoding an enzyme having glycine decarboxylase activity comprises an amino acid sequence set forth in UniProt ID P33195. In a further embodiment, the one or more nucleic acid molecule encoding an enzyme having glycine decarboxylase activity is encoded by a nucleic acid sequence set forth in Gene ID 947394.

[0753] Reaction Catalyzed by T-Protein

[0754] The decarboxylated moiety of glycine attached to H-protein is subjected to further degradation catalyzed by T-protein (an aminomethyltransferase). The reaction requires THF and yields ammonia, M-THF, and H-protein with reduced lipoate. In the absence of THF, formaldehyde is produced instead of M-THF, but the reaction rate is less than 0.05% of that measured in the presence of THF. In the reverse reaction, T-protein catalyzes the formation of the H-protein-bound aminomethyl lipoate intermediate from M-THF, ammonia, and H-protein with reduced lipoate via an ordered Ter Bi mechanism, in which H-protein is the first substrate to bind followed by M-THF and ammonia. The order of the product release is THF and the methylamine-loaded H-protein.

[0755] T-protein is a monomer of about 40 kDa and forms a 1:1 complex with H-protein. A cross-linking study employing E. coli proteins revealed that the interaction of H-protein with T-protein causes a conformational change of T-protein. Intermolecular contact between Lys-288 of T-protein and Asp-43 of H-protein was found. The N-terminal region of T-protein is essential for the interaction with H-protein and for holding T-protein in a compact form. The crystal structure of human T-protein has been analyzed in a free form and that bound to N5-methyl-tetrahydrofolate, an analogue of M-THF. The overall structure consists of three cloverleaf-like structure with the central cavity where the THF cofactor is bound with the pteridin ring deeply buried into the hydrophobic pocket and the glutamyl group pointed to the C-terminal side surface. The structure resembles those of bacterial T-protein from Termotoga naritima, E. coli, and Pyrococcus horikoshii OT3. Structural and mutational analyses of human T-protein indicated that the invariant Asp-101 might play a key role in the initiation of the catalysis by increasing the nucleophilic character of the N10 atom of the folate substrate.

[0756] Residues involved in binding of folate have been identified by crosslinking and site-directed mutagenesis. The N-terminal region of GvcT is important for the proper conformation of GvcT, allowing interaction with the H-protein.

[0757] In some embodiments, the enzyme having aminomethyltransferase activity is encoded by an amino acid sequence having at least 70% sequence identity, having at least 80% sequence identity, or having at least 90% sequence identity to E. coli gcvT. In some embodiments, the one or more nucleic acid molecule encoding an enzyme having aminomethyltransferase activity comprises an amino acid sequence set forth in UniProt ID P27248. In a further embodiment, the one or more nucleic acid molecule encoding an enzyme having aminomethyltransferase activity is encoded by a nucleic acid sequence set forth in Gene ID 947390.

[0758] Reaction Catalyzed by L-Protein

[0759] The last step of the glycine cleavage reaction is the reoxidation of the reduced lipoate attached to H-protein catalyzed by L-protein. L-protein is well known as dihydrolipoamide dehydrogenase, lipoamide dehydrogenase, dihydrolipoyl dehydrogenase, or E3 protein component of 2-oxoacid (pyruvate, 2-oxoglutarate, and branched-chain 2-oxoacid) dehydrogenase multienzyme complexes. It catalyzes the transfer of electrons to the ultimate acceptor, NAD.

[0760] Experiments employing pea L-protein and H-protein showed that the oxidation of dihydrolipoyl H-protein was not affected by the presence of structurally related analogues such as apoH-protein or octanoylated H-protein. The structural interaction between L-protein and H-protein may not be essential for the oxidation reaction.

[0761] Kinetics of the reaction have been studied and suggest a modified ping-pong mechanism. Site-directed mutagenesis was used to identify and characterize the redox-active disulfide and a charged residue influencing the redox potential of the FAD cofactor. The insertion of the FAD cofactor is essential for dimerization and full activity.

[0762] An lpd null mutant produces more pyruvate and L-glutamate under aerobic conditions. Metabolic flux analysis shows that the Entner-Doudoroff pathway I and the glyoxylate shunt are activated. Another dihydrolipoate dehydrogenase activity has been detected in E. coli lpd mutants; thus, an isozyme may exist.

[0763] A mutation in the lpd gene in E. coli causes the pyruvate dehydrogenase complex to be less sensitive to NADH inhibition and active during anaerobic growth. Amino acid substitutions at Glu354 that lowered the sensitivity of the enzyme to NADH inhibition were proposed to act by restricting the movement of NADH.

[0764] Suppressor mutations in lpd have been shown to restore growth to a redox-defective mutant that lacks both the thioredoxin and glutathione/glutaredoxin reduction pathways. The suppressor mutations reduced Lpd activity resulting in dihydrolipoamide accumulation, which could then serve as an electron donor via reduction of glutaredoxins. The reoxidation of Lpd restored TCA cycle function.

[0765] lpd shows differential codon adaptation, resulting in differential translation efficiency signatures, in aerotolerant compared to obligate anaerobic microbes. It was therefore predicted to play a role in the oxidative stress response. An lpd deletion mutant was shown to be more sensitive than wild-type specifically to hydrogen peroxide exposure, but not other stresses.

[0766] In some embodiments, the enzyme having dihydrolipoamide dehydrogenase activity is encoded by an amino acid sequence having at least 70% sequence identity, having at least 80% sequence identity, or having at least 90% sequence identity to E. coli lpd (lpdA, E3 subunit). In some embodiments, the one or more nucleic acid molecule encoding an enzyme having dihydrolipoamide dehydrogenase activity comprises an amino acid sequence set forth in UniProt ID P0A9P0. In a further embodiment, the one or more nucleic acid molecule encoding an enzyme having dihydrolipoamide dehydrogenase activity is encoded by a nucleic acid sequence set forth in Gene ID 944854.

[0767] H-Protein

[0768] H-protein is a monomeric and heat-stable protein of about 14 kDa. Vertebrate H-protein is composed of 125 amino acid residues, and lipoic acid is covalently linked to Lys-59. The X-ray crystal structure of the lipoylated pea leaf H-protein (131 residues) revealed that the lipoyl-lysine was localized on the surface of the protein. As mentioned above, the lipoyllysine arm on H-protein shuttles the reaction intermediate and reducing equivalents between the active sites of the components of the glycine cleavage system. The mechanism is analogous to that found in 2-oxoacid dehydrogenase complexes.

[0769] Lipoylation of H-protein as well as acyltransferase (E2) components of 2-oxoacid dehydrogenase complexes is catalyzed by lipoate-protein ligase A (LplA) in E. coli. The enzyme catalyzes both the formation of lipoyl-AMP from lipoate and ATP and the transfer of the lipoyl-moiety of lipoyl-AMP to H-protein and E2 components. The X-ray crystallographic study showed that LplA consists of a large N-terminal domain and a small C-terminal domain with a substrate-binding pocket at the interface between the two domains.

[0770] In mammals, lipoylation is an intramitocondrial event. Lipoic acid is first activated to lipoyl-GMP by lipoate activating enzyme, employing GTP as a high-energy compound. Lipoate activating enzyme is the same protein already known as xenobiotic-metabolizing medium-chain fatty acid: CoA ligase-III. Lipoate is then transferred from lipoyl-GMP to apoproteins by the action of lipoyltransferase.

[0771] The H-protein, coded for by the gcvH gene in E. coli, is a lipoylprotein that is reduced as it shuttles the methylamine group of glycine from the P-protein to the T-protein and is reoxidized by the dihydrolipoamide dehydrogenase. GcvH functions as a substrate for the three enzymes of the gcv complex.

[0772] Residues 61-65 are predicted to contain the lipoyl modification (on lysine), based on conservation of these residues and their correspondence to the lipoate attachment site of the Pisum sativum protein.

[0773] The interaction between GcvH and GcvT has been examined. Interaction between the two proteins may be necessary to form the folate binding site, in which the folate polyglutamyl region binds, exposing the pteridine ring. The GcvT N terminus is important for interaction with GcvH, probably by mediating a conformational change, and residue D43 of GcvH is proximal to GcvT in the GcvH-GcvT complex.

[0774] In some embodiments, the H-protein is encoded by an amino acid sequence having at least 70% sequence identity, having at least 80% sequence identity, or having at least 90% sequence identity to E. coli gcvH. In some embodiments, the one or more nucleic acid molecule encoding an H-protein comprises an amino acid sequence set forth in UniProt ID P0A6T9. In a further embodiment, the one or more nucleic acid molecule encoding an H-protein is encoded by a nucleic acid sequence set forth in Gene ID 947393.

### Glycolate Dehydrogenase or Glycolate Oxidase (EC 1.1.99.14)

[0775] The present disclosure describes enzymes that can catalyze the following reaction:

[0776] glycolate+an oxidized electron acceptor→glyoxylate+a reduced electron acceptor

[0777] Glycolate dehydrogenase may also be known as glycolate oxidase, glycolate oxidoreductase and glycolate:(acceptor) 2-oxidoreductase.

[0778] Glycolate oxidase catalyzes the first step in the utilization of glycolate as the sole source of carbon. The enzyme may be membrane-associated. A cytoplasmic membrane-associated glycolate oxidoreductase activity from E. coli ATCC11775 (serovar O1:K1:H7) has been isolated, and the GlcF subunit itself could only be detected in the membrane fraction. The physiological electron acceptor is unknown. Crude extracts from an E. coli strain expressing glcDEF from a multicopy plasmid contain glycolate oxidase activity. Insertion mutants in either glcD, glcE, or glcF abolish this activity, suggesting that all three gene products are subunits of a glycolate oxidase complex. Expression of the glcDEFGB operon is induced by growth on glycolate.

[0779] A putative glycolate oxidase in Arabidopsis thaliana is a mitochondrial homodimeric protein that binds one FAD per monomer and is expressed in leaves, stems, flowers and roots. Enzyme activity is inhibited by cyanide ions. It catalyzes the oxidation of D-lactate to pyruvate stereospecifically, mediating the detoxification of methylglyoxal and D-lactate.

[0780] In some embodiments, the enzyme having glycolate dehydrogenase activity is encoded by an amino acid sequence having at least 70% sequence identity, having at least 80% sequence identity, or having at least 90% sequence identity to an enzyme having glycolate dehydrogenase activity selected from E. coli glycolate dehydrogenase GLC and Arabidopsis thaliana glycolate dehydrogenase. In some embodiments, the one or more nucleic acid molecule encoding a glycolate dehydrogenase or glycolate dehydrogenase subunit comprises an amino acid sequence selected from UniProt ID P0AEP9, UniProt ID P52073, UniProt ID P52074, and UniProt ID Q94AX4. In a further embodiment, the one or more nucleic acid molecule encoding a glycolate dehydrogenase or glycolate dehydrogenase subunit is encoded by a nucleic acid sequence selected from Gene ID 947353, Gene ID 2847718, Gene ID 2847717, and GenBank accession Y13245.1.

### Alanine-Glyoxylate Aminotransferase (EC 2.6.1.44)

[0781] The present disclosure describes enzymes that can catalyze the following reaction:

[0782] glyoxylate+L-alanine↔H glycine+pyruvate

[0783] In Saccharomyces cerevisiae alanine-glyoxylate aminotransferase subunit is one of three different enzymes used for glycine synthesis. The AGX1 gene, encoding this enzyme, was identified by comparing enzyme specific activities in knockout strains. When placed in a background defficient for the other enzymes responsible for glycine synthesis, the mutation in AGX1 produced complete glycine auxotrophy. The enzymes was subsequently purified and characterized. The enzyme, which contains pyridoxal 5′-phosphate as cofactor, is a homodimer of about 80 kDa, and is highly specific for L-alanine and glyoxylate.

[0784] The mitochondrially localized Homo sapiens alanine-glyoxylate aminotransferase 2 (AGXT2) and peroxisomal serine-pyruvate aminotransferase (AGXT1, see above) both catalyze the conversion of glyoxylate to glycine using alanine as the amino donor. However, AGXT2, but not AGXT1, can also utilize asymmetric dimethylarginine (ADMA) as an amino donor, leading to the formation of α-keto-δ-(NN-dimethylguanidino) valeric acid (DMGV). ADMA is a potent endogenous inhibitor of nitric-oxide (NO) synthase. ADMA levels are also controlled by cytosolic dimethylarginine dimethylaminohydrolases (DDAHs) that hydrolyze ADMA to citrulline and dimethylamine. Elevated levels of ADMA are associated with diabetes, hypertension, congestive heart failure, and atherosclerosis. AGXT2 is a pyridoxal phosphate dependent enzyme that is expressed primarily in the kidney, and its activity is one mechanism by which the kidney regulates blood pressure.

[0785] In Arabidopsis thaliana, alanine transaminases with four aminotransferase activities have been identified. AOAT1 (GGAT1) is peroxisomal located. Knock-out plants have reduced activity of AOAT, GPAT (glutamate:pyruvate aminotransferase), AGAT (alanine: glyoxylate aminotransferase) and GGAT (glutamate: glyoxylate aminotransferase). The GGAT and AGAT activities were reduced most drastically. These indicate AOAT1 is primarily involved in photorespiration. Similarly, AOAT2 (GGAT2), which is predicted to be located in the peroxisome, is likely involved in photorespiration. In vitro assay of the recombinant proteins indicated that GGAT1 and GGAT2 have four aminotransferase activities, namely GGAT, AGAT, GPAT and AOAT. The two recombinant proteins exhibited very similar Km values towards amino acid substrates glutamate and alanine, as well as the oxoacid substrates glyoxylate, pyruvate and 2-oxoglutarate.

[0786] In some embodiments, the enzyme having alanine-glyoxylate aminotransferase activity is encoded by an amino acid sequence having at least 70% sequence identity, having at least 80% sequence identity, or having at least 90% sequence identity to an enzyme having alanine-glyoxylate aminotransferase activity selected from Saccharomyces cerevisiae AGX1, Homo sapiens AGXT2, Arabidopsis thaliana AOAT1 and Arabidopsis thaliana AOAT2. In some embodiments, the one or more nucleic acid molecule encoding an enzyme having alanine-glyoxylate aminotransferase activity comprises an amino acid sequence selected from UniProt ID P43567, UniProt ID Q9BYV1, UniProt ID Q9LR30 and UniProt ID Q9S7E9. In a further embodiment, the one or more nucleic acid molecule encoding an enzyme having alanine-glyoxylate aminotransferase activity is encoded by a nucleic acid sequence selected from Gene ID 850514, Gene ID 64902, TAIR accession AT1G23310 and TAIR accession AT1G70580.

### Alanine Transaminase (EC 2.6.1.2)

[0787] The present disclosure describes enzymes that can catalyze the following reaction:

[0788] 2-oxoglutarate+L-alanine↔L-glutamate+pyruvate

[0789] In some embodiments, the alanine transaminase is a glutamate-pyruvate aminotransferase. AlaA is one of three major alanine-synthesizing transaminases in E. coli. AlaA and AlaC together account for 90% of glutamic-pyruvic transaminase (GPT) activity in the cell. A crystal structure of AlaA has been solved at 2.11 Å resolution. The structure shows a symmetric α2 homodimer typical of fold type I aminotransferases. An alaA deletion strain has no growth defect, but an alaA avtA double mutant forms small colonies on agar plates. An alaA avtA alaC triple mutant has a slow growth phenotype in liquid medium. The defects of the double and triple mutants can be rescued by addition of alanine. Fitness and competitive growth experiments were performed under different growth conditions. Particularly under oxygen-limiting conditions, the doubling time of the AalaA strain in minimal media is increased compared to growth in rich media. Under competitive growth conditions, the ΔalaA mutation confers a disadvantage compared to wild type even in rich media. alaA was identified in a screen for genes that reduce the lethal effects of stress. An alaA insertion mutant is more sensitive than wild type to mitomycin C and other stresses and less sensitive to 10% SDS. The alaA gene was first identified as a mutant with a leaky requirement for alanine or valine.

[0790] AlaB is one of three major alanine-synthesizing transaminases in E. coli. AlaB catalyzes a glutamate-pyruvate aminotransferase reaction, generating alanine from pyruvate with glutamate as the amino donor. This activity has been assayed in crude cell extracts, and the gene encoding AlaB had been isolated on a plasmid. Expression of alaB from a multicopy plasmid partially suppresses the growth defect of an ilvE alaA mutant strain.

[0791] AlaC is one of three major alanine-synthesizing transaminases in E. coli. A homology model of the enzyme based on the crystal structure of AlaA has been generated. An alaC deletion strain has no growth defect, but an alaA avtA alaC triple mutant has a slow growth phenotype in liquid medium. The defect can be rescued by addition of alanine. Fitness and competitive growth experiments were performed under different growth conditions. Particularly under oxygen-limiting conditions, the doubling time of the ΔalaC strain in minimal media is increased compared to growth in rich media; unlike for the alaA and avtA mutants, addition of L-alanine returns the doubling time to that observed in DMEM medium. Under competitive growth conditions, the ΔalaC mutation confers a disadvantage compared to wild type even in rich media. Expression of alaC is activated by the transcriptional regulator SgrR. AlaC may thus play a role in glucose-phosphate stress. However, an alaC deletion mutant does not show altered sensitivity to α-methylglucoside, which induces sugar-phosphate stress.

[0792] In Homo sapiens, alanine aminotransferase is a cytoplasmic enzyme that catalyzes the reversible transamination between L-alanine and 2-oxoglutarate to form pyruvate and L-glutamate. The interconversion of these four major metabolic intermediates gives this enzyme both degradative and biosynthetic roles. It participates in the alanine-glucose cycle of skeletal muscle and liver, gluconeogenesis, and glutamate generation in the brain. Alanine aminotransferase is expressed in kidney, skeletal muscle, adipose tissue and heart. There are two isoforms of the enzyme: alanine aminotransferase 1 (GPT) and alanine aminotransferase 2 (GPT2). Human alanine aminotransferase 1 (GPT) was purified from liver. Recombinant human alanine aminotransferase 2 (GPT2) from adipose tissue was expressed in Escherichia coli and the molecular mass was determined by SDS-PAGE. The enzyme is expressed at high levels in adipose tissue, muscle, brain and kidney and at lower levels in breast and liver.

[0793] The subunit structure of an alanine transaminase from the marine polychaete annelid Arenicola marina (lugworm) has not been reported. It has a native apparent molecular mass of 91 kDa as determined by gel filtration chromatography. The gene encoding it in this organism has not been identified. In marine annelids and mollusks this reaction participates in an anaerobic energy generation pathway that operates during periods of hypoxia or anoxia. Alanine transaminase (glutamate pyruvate transaminase) from this organism has been partially purified from body wall muscle and characterized. High alanine transaminase activity was found in this tissue. Specific, reversible, L-glutamate-dependent L-alanine transaminase and L-aspartate transaminase activities have also been demonstrated in tissues of the mussel Mytilus edulis.

[0794] The Arabidopsis thaliana tryptophan aminotransferase TAA1 protein is involved in the formation of indole-3-pyruvate, a precursor to indole-3-acetate (IAA), a biologically important auxin that acts as a phytohormone in many plant species. In vitro assays reveal that this pyridoxal 5′-phosphate (PLP)-dependent aminotransferase can act on a number of different L-amino acids, including L-phenylalanine, L-tyrosine, L-leucine, L-alanine, L-methionine, and L-glutamine using either pyruvate or 2-oxoglutarate as a cosubstrate. However, enzymatic assays, in silico docking experiments, and mutant phenotypic analyses all suggest that L-tryptophan is the in vivo substrate for this enzyme. TAA1 has a Km of 0.29 mM and a Vmax of 12.9 μM/min when tested with L-tryptophan and pyruvate. It is unclear whether pyruvate or 2-oxoglutarate is the more biologically relevant cosubstrate for this enzyme.

[0795] The gene encoding this protein was identified in screens for shade avoidance mutants and mutants with a weak ethylene insensitivity suggesting that the auxin synthesized through a TAA1-mediated pathway is particularly important for the responses to specific environmental and hormonal stimuli. In addition, normal developmental processes, such as embryogenesis, that require proper auxin levels, are disrupted when TAA1 and one or more of its closely related family members (i.e. TAR1 and TAR2) are knocked-out in Arabidopsis plants. This enzyme activity appears to be widely distributed in the plant kingdom, based on the ability of enzymatic extracts from 30 different species distributed among 16 families, to catalyze the formation of IPA in a transaminase reaction. Three species of algae also have this activity.

[0796] In Arabidopsis thaliana, alanine transaminases with four aminotransferase activities have been identified. AOAT1 (GGAT1) is peroxisomal located. Knock-out plants have reduced activity of AOAT, GPAT (glutamate:pyruvate aminotransferase), AGAT (alanine: glyoxylate aminotransferase) and GGAT (glutamate: glyoxylate aminotransferase). The GGAT and AGAT activities were reduced most drastically. These indicate AOAT1 is primarily involved in photorespiration. Similarly, AOAT2 (GGAT2), which is predicted to be located in the peroxisome, is likely involved in photorespiration. In vitro assay of the recombinant proteins indicated that GGAT1 and GGAT2 have four aminotransferase activities, namely GGAT, AGAT, GPAT and AOAT. The two recombinant proteins exhibited very similar Km values towards amino acid substrates glutamate and alanine, as well as the oxoacid substrates glyoxylate, pyruvate and 2-oxoglutarate.

[0797] Alanine aminotransferase activities have also been described from Candida maltosa, Clostridium propionicum, Pyrococcus furiosus, Megathyrsus maximus and Panicum miliaceum. The Panicum miliaceum putative alanine aminotransferase was cloned from this NAD-ME type C4 plant and found to express in both mesophyll and bundle sheath cells, and the gene expression was light-inducible. The mRNA accumulation increased dramatically during greening in both cell types which is in agreement with its predicted role in C4 photosynthesis.

[0798] In some embodiments, the enzyme having alanine transaminase activity is encoded by an amino acid sequence having at least 70% sequence identity, having at least 80% sequence identity, or having at least 90% sequence identity to an enzyme having alanine transaminase activity selected from E. coli glutamate-pyruvate aminotransferase alaA, E. coli glutamate-pyruvate aminotransferase alaB, E. coli glutamate-pyruvate aminotransferase alaC, Homo sapiens alanine aminotransferase 1 (GPT), Homo sapiens alanine aminotransferase 2 (GPT2), Arenicola marina alanine transaminase, Arabidopsis thaliana tryptophan aminotransferase TAA1, Arabidopsis thaliana AOAT1, Arabidopsis thaliana AOAT2, Candida maltosa alanine aminotransferase, Clostridium propionicum alanine aminotransferase, Pyrococcus furiosus alanine aminotransferase aat, Megathyrsus maximus alanine transaminase, and Panicum miliaceum alanine transaminase AlaAT-2. In some embodiments, the one or more nucleic acid molecule encoding enzyme having alanine transaminase activity comprises an amino acid sequence selected from UniProt ID P0A959, UniProt ID P77434, UniProt ID P24298, UniProt ID Q8TD30, UniProt ID Q9S7N2, UniProt ID Q9LR30, UniProt ID Q9S7E9, UniProt ID Q9P9M8, and UniProt ID P34106. In a further embodiment, the one or more nucleic acid molecule encoding enzyme having alanine transaminase activity is encoded by a nucleic acid sequence selected from Gene ID 946772, Gene ID 946850, Gene ID 2875, Gene ID 84706, Gene ID 843393, TAIR accession AT1G23310, TAIR accession AT1G70580, GenBank accession AF163769.1 and GenBank accession X69421.1.

### Glutamate Dehydrogenase (EC 1.4.1.2 and EC 1.4.1.3)

[0799] The present disclosure describes enzymes that can catalyze the following reactions:

[0800] L-glutamate+NAD⁺+H2O↔2-oxoglutarate+ammonium+NADH+H+

[0801] L-glutamate+NAD(P)⁺+H2O↔2-oxoglutarate+ammonium+NAD(P)H+H+

[0802] In some embodiments, the glutamate dehydrogenase is an NAD-dependent glutamate dehydrogenase from Saccharomyces cerevisiae (GDH2) that degrades glutamate to ammonia and alpha-ketoglutarate. Expression of GDH2 is sensitive to nitrogen catabolite repression and intracellular ammonia levels.

[0803] There are two NAD-dependent glutamate dehydrogenase (GDH) genes in Arabidopsis, GDH1 and GDH2, encoding the alpha- and beta-subunits, respectively. Seven hexameric isoforms of GDH have been detected which are composed of different ratios of the alpha and beta subunits. Different isoforms are distributed in different tissues under different environmental and physiological conditions. The enzyme activity of GDH is controlled in part at the transcriptional level.

[0804] Glutamate dehydrogenase from Peptoniphilus asaccharolyticus catalyzes the NAD-dependent, oxidative deamination of L-glutamate to 2-oxoglutarate. The reaction is highly substrate specific. No activity was observed in the presence of D-glutamate, D- or L-asparate, glutamine or when NADP replaced NAD. Using sucrose gradient density centrifugation, researchers estimated that the molecular weight of the native enzyme was between 300-340 kDa, suggesting that the enzyme may be a homohexamer. Other researchers, on the other hand, estimated that the molecular weight of the native enzyme was approximately 226 kDa, using gel filtration. The KM values for L-glutamate and NAD+ were 1.3 mM and 0.25 mM, respectively.

[0805] Halobacterium salinarum is one of the organisms reported to have more than one form of GDH, with different forms utilizing different cofactors (NAD and NADP). It was eventually shown that the organism has four genes encoding four different glutamate dehydrogenase enzymes. Two of these gene products have been purified and characterized biochemically. One of the genes, gdhAl, which was originally predicted to encode an NADP-specific form, was found to encode an NAD-specific enzyme.

[0806] Homo sapiens glutamate dehydrogenases (GDHs) are homohexameric mitochondrial matrix enzymes that catalyze the reversible oxidative deamination of L-glutamate to 2-oxoglutarate and ammonia. Mammalian GDHs are unusual enzymes, in that they are able to use either NAD or NADP as a co-factor. Humans express two GDH isoenzymes. Glutamate dehydrogenase 1 (GLUD1) is expressed at high levels in liver, brain, pancreas and kidney. Glutamate dehydrogenase 2 (GLUD2) is encoded by an X chromosome-linked intronless gene and is expressed in retina, testis, and brain. Mutations in GLUD1 that lead to enzyme overactivity, result in hyperinsulinemia. Allosteric control of mammalian GDH activity by positive effectors like ADP and L-leucine and negative effectors like GTP have been extensively studied.

[0807] Bacillus subtilis PCI 219 has a single glutamate dehydrogenase (GDH) with dual coenzyme specificity for NAD(H) and NADP(H). Its molecular weight was estimated to be 250,000+/−20,000 by gel filtration, and 270,000+/−30,000 by zone centrifugation in a sucrose density gradient. The subunit size was about 57,000, suggesting that it is a homotetramer.

[0808] A cDNA clone was isolated from Solanum lycopersicum tissues. The cDNA encoded a protein that shares identity with glutamate dehydrogenase (GDH) of plants. Expression analysis of this protein showed that it is expressed in stems, roots and leaves but is absent in fruit tissues. The study also showed that the two subunits of tomato GDH1 were encoded by a single gene. This enzyme converts 2-oxoglutarate to L-glutamate.

[0809] Glutamate dehydrogenase activities have also been described from Clostridium propionicum and Thermotoga maritima.

[0810] In some embodiments, the enzyme having glutamate dehydrogenase activity is encoded by an amino acid sequence having at least 70% sequence identity, having at least 80% sequence identity, or having at least 90% sequence identity to a glutamate dehydrogenase selected from Saccharomyces cerevisiae NAD-dependent glutamate dehydrogenase GDH2, Arabidopsis thaliana NAD-dependent glutamate dehydrogenase GDH2, Arabidopsis thaliana NAD-dependent glutamate dehydrogenase GDH1, Peptoniphilus asaccharolyticus NAD-dependent glutamate dehydrogenase gdhA, Halobacterium salinarum NAD-dependent glutamate dehydrogenase gdhA, Thermotoga maritima glutamate dehydrogenase, Homo sapiens glutamate dehydrogenase 1 (GLUD1), Homo sapiens glutamate dehydrogenase 2 (GLUD2), Bacillus subtilis glutamate dehydrogenase and Solanum lycopersicum glutamate dehydrogenase GDH1. In some embodiments, the one or more nucleic acid molecule encoding an enzyme having glutamate dehydrogenase activity comprises an amino acid sequence selected from UniProt ID P33327, UniProt ID Q38946, UniProt ID Q38946, UniProt ID P28997, UniProt ID P29051, UniProt ID P00367, UniProt ID P49448 and UniProt ID P93541. In a further embodiment, the one or more nucleic acid molecule encoding an enzyme having glutamate dehydrogenase activity is encoded by a nucleic acid sequence selected from Gene ID 461927, TAIR accession AT5G07440, TAIR accession AT5G18170, GenBank accession M76403.1, GenBank accession X63837.1, Gene ID 2746, Gene ID 2747 and GenBank accession U48695.1.

### Acetaldehyde Dehydrogenase (EC 1.2.1.10)

[0811] The present disclosure describes enzymes that can catalyze the following reaction:

[0812] acetaldehyde+coenzyme A+NAD⁺↔acetyl-CoA+NADH+H+

[0813] E. coli mhpF encodes an acylating acetaldehyde dehydrogenase. MhpF is active as a monomer; the rate-limiting step of the reaction appears to be transthioesterification. MhpF is involved in synthesis of n-butanol in an engineered reversal of the β-oxidation pathway. The expression of MhpE is translationally coupled to MhpF, and interaction between the two proteins appears to be required for solubility of MhpE.

[0814] E. coli AdhE is a homopolymeric protein with three Fe2⁺-dependent catalytic functions: alcohol dehydrogenase, coenzyme A-dependent acetaldehyde dehydrogenase, and pyruvate formate-lyase deactivase. However, the existence of the pyruvate formate-lyase deactivase activity of AdhE has been debated. The homopolymeric structure of AdhE is unusual in that 20-60 subunits are helically arranged to form rod-like ultrastructures. Under fermentative conditions AdhE catalyzes the reduction of acetyl-CoA to acetaldehyde and the latter compound to ethanol. Aerobically, in the reverse direction, AdhE can catalyze the oxidation of acetaldehyde to acetyl-CoA. Expression of adhE appears to be regulated at the transcriptional and translational levels, and possibly at the posttranslational level. Expression of adhE is approximately 10-fold higher during anaerobic growth than during aerobic growth. The AdhE from E. coli B was partially purified and characterized in early work. It was later purified to homogeneity from E. coli B and its coenzyme A-linked aldehyde dehydrogenase activity was subjected to detailed kinetic analysis. A bi-uni-uni-uni ping-pong mechanism was proposed. AdhE from Salmonella enterica subsp. enterica serovar Typhimurium showed 70% amino acid sequence identity to that of E. coli. It had a lower Km for alcohol substrates and some differences in substrate specificity as compared to the E. coli enzyme. In the metabolic engineering field, deletion of adhE is a determinant in the production of compounds such as succinate, D-lactate, and polyhydroxyalkanoates.

[0815] Chlamydomonas reinhardtii ADH1 encodes a dual function alcohol dehydrogenase/acetaldehyde dehydrogenase. It appears to be active under anoxic conditions and participates in two different anaerobic ethanol production pathways in Chlamydomonas.

[0816] DmpF is an acylating acetaldehyde dehydrogenase from Pseudomonas sp. The final two steps of the meta-cleavage pathway in Pseudomonas sp. CF600 involve the conversion of (S)-4-hydroxy-2-oxopentanoate to pyruvate and acetyl-CoA by the enzymes 4-hydroxy-2-oxovalerate aldolase and acetaldehyde dehydrogenase (acylating). Biochemical studies demonstrated that these two enzymes comprise a bifunctional aldolase-dehydrogenase heterodimer, and suggest that the product of the aldolase reaction, acetaldehyde, is transferred to the dehydrogenase active site via a channeling mechanism. This minimizes the risk to the cells posed by the toxic acetaldehyde.

[0817] The presence of the todI gene product in Pseudomonas putida F1 was suggested by the protein expression pattern of plasmid constructs. The predicted amino acid sequence of the todI gene product showed very high identity with other bacterial acylating aldehyde dehydrogenase gene products.

[0818] The adhE gene of Clostridium acetobutylicum ATCC 824 encodes a multifunctional enzyme that has both alcohol dehydrogenase and acetaldehyde dehydrogenase activities. Both activities are necessary for the formation of butan-1-ol and ethanol during solventogenesis. The adhE gene is part of the sol operon, which is located on the pSOL1 megaplasmid. Expression of the gene from a plasmid in Clostridium acetobutylicum ATCC 824 resulted in elevated activities of NADH-dependent butanol dehydrogenase, NAD-dependent acetaldehyde dehydrogenase and butyraldehyde dehydrogenase, and a small increase in NADH-dependent ethanol dehydrogenase. Complementation of a mutant deficient in butyraldehyde dehydrogenase, acetoacetate decarboxylase, and acetoacetyl-coenzyme A:acetate/butyrate:coenzyme A-transferase activities, which produces neither butanol nor acetone, by the adhE gene resulted in restored butanol formation without any acetone formation or any significant increase in ethanol production, suggesting that the primary role of the enzyme is in butanol formation, providing both a butanal dehydrogenase activity (converting butanoyl-CoA to butan-1-al) and butanol dehydrogenase activity. In addition, inactivation of the gene drastically reduced butanol production (by 85%), supporting this role. Another gene from the pSOL1 plasmid, adhE2, encodes a second multifunctional aldehyde/alcohol dehydrogenase involved in butanol production. However, that enzyme is produced only under alcohologenic conditions, and is not expressed under solventogenic conditions. The gene from strain ATCC 824 was originally called aad.

[0819] Acetaldehyde dehydrogenase activities have also been described from Leuconostoc mesenteroides, Pelobacter acetylenicus and Pseudomonas putida. The partially purified Leuconostoc mesenteroides CoA-dependent aldehyde dehydrogenase could not be separated from an NAD-linked alcohol dehydrogenase that co-purified with it. The enzyme was specific to NAD and could not use NADP. While acetaldehyde and 1-propanal were the best substrates, the enzyme could also use butan-1-al (31% of activity with acetaldehyde) and isobutanal (14%).

[0820] In some embodiments, the enzyme having acetaldehyde dehydrogenase activity is encoded by an amino acid sequence having at least 70% sequence identity, having at least 80% sequence identity, or having at least 90% sequence identity to an enzyme having acetaldehyde dehydrogenase activity selected from E. coli mhpF, E. coli AdhE, Chlamydomonas reinhardtii ADH1, Leuconostoc mesenteroides CoA-dependent acetaldehyde dehydrogenase, Pelobacter acetylenicus acetaldehyde dehydrogenase, Pseudomonas sp. dmpF, Pseudomonas putida acylating aldehyde dehydrogenase todl, Pseudomonas putida acetaldehyde dehydrogenase cmtH and Clostridium acetobutylicum alcohol/aldehyde dehydrogenase AdhE. In some embodiments, the one or more nucleic acid molecule encoding an enzyme having acetaldehyde dehydrogenase activity comprises an amino acid sequence selected from UniProt ID P77580, UniProt P0A9Q7, UniProt ID A8JI07, UniProt ID Q52060, UniProt ID Q51949 and UniProt ID P33744. In a further embodiment, the one or more nucleic acid molecule encoding an enzyme having acetaldehyde dehydrogenase activity is encoded by a nucleic acid sequence selected from Gene ID 945008, Gene ID 945837, Gene ID 5729132, GenBank accession X60835.1, GenBank accession U09250.1 and Gene ID 1116167.

### Ethanolamine Ammonia Lyase (EC 4.3.1.7)

[0821] The present disclosure describes enzymes that can catalyze the following reaction:

[0822] ammonium+acetaldehyde↔ethanolamine

[0823] Ethanolamine ammonia-lyase (EAL) allows E. coli to utilize ethanolamine as the sole source of nitrogen and carbon in the presence of external vitamin B12. EAL is an adenosylcobalamin-dependent enzyme that is spontaneously inactivated by its substrate and can be reactivated by EutA. The enzyme was first studied in the non-K-12 strain NCIB 8114. Crystal structures of an N-terminally truncated, but active form of the enzyme both in binary and ternary complexes with the cofactor and substrate have been solved. The enzyme is composed of a hexamer of (αβ)2 dimers, with the α subunit holding the active site and the cobalamin cofactor bound at the interface between the α and β subunits. The authors propose a reaction mechanism that is consistent with a previously described mechanism for adenosylcobalamin-dependent rearrangements. The stereochemical course of the reaction has been modeled on the basis of crystal structures, accounting for the apparent lack of stereospecificity of the enzyme. Production of EAL is catabolite repressed and is induced by the simultaneous presence of ethanolamine and the adenosylcobalamin cofactor. Ethanolamine ammonia-lyase comprises two subunits, α (EutB) and β (EutC).

[0824] In some embodiments, the enzyme having ethanolamine ammonia lyase activity is encoded by an amino acid sequence having at least 70% sequence identity, having at least 80% sequence identity, or having at least 90% sequence identity to an E. coli enzyme having ethanolamine ammonia lyase activity. In some embodiments, the one or more nucleic acid molecule encoding an ethanolamine ammonia lyase subunit comprises an amino acid sequence selected from UniProt ID P0AEJ6 and UniProt ID P19636. In a further embodiment, the one or more nucleic acid molecule encoding an ethanolamine ammonia lyase subunit is encoded by a nucleic acid sequence selected from Gene ID 946924 and Gene ID 946925.

### Serine Aminase (EC 2.6.1.-)

[0825] The present disclosure describes enzymes that can catalyze the following reaction:

[0826] L-Serine+NH4⁺→(S)-2,3-diaminopropanoate

[0827] In some embodiments, an enzyme having serine aminase activity can be a serine-glyoxylate transaminase. In other embodiments, an enzyme having serine aminase activity can be a serine-pyruvate transaminase (see above).

[0828] Serine-glyoxylate aminotransferase catalyzes the transfer of the α-amino group of L-serine to glyoxylate, forming glycine and hydroxypyruvate. In the serine-cycle methylotrophs this enzyme plays two important roles: the formation of an acceptor (glycine) for a one-carbon unit, and the conversion of L-serine to hydroxypyruvate in the assimilatory pathway. This is the first microbial serine-glyoxylate aminotransferase to be purified, and a few years later the gene encoding it was identified as well.

[0829] Serine: glyoxylate aminotransferase encoded by Arabidopsis thaliana AGT1 is a. homodimer. The purified recombinant protein has the highest activity with the serine: glyoxylate transamination. It also catalyzed alanine: glyoxylate transamination and serine: pyruvate transamination with much lower specific activity.

[0830] sgaA is presumed to be the gene encoding serine-glyoxylate aminotransferase on the Methylobacterium extorquens chromosome. While the product of the cloned gene has not been expressed, mutation complementation was used to investigate its role. Mutations in this gene have abolished the ability to grow on C1 compounds, and complementation of the mutants by a cloned intact version of the gene fragment has restored activity. In addition, sgaA sequence is similar to a number of aminotransferases.

[0831] In further embodiments, an enzyme having serine aminase activity can be an enzyme having phosphoserine aminotransferase activity. In some embodiments, the one or more nucleic acid molecules encoding the phosphoserine aminotransferase is serC, or homolog thereof. In another embodiment, the one or more nucleic acid molecules encoding an enzyme having phosphoserine aminotransferase activity, an enzyme having L-serine transaminase activity, or an enzyme having serine aminotransferase activity comprise an amino acid sequence set forth in SEQ ID NO: 230. In a further embodiment, the one or more nucleic acid molecule encoding an enzyme having phosphoserine aminotransferase activity, an enzyme having L-serine transaminase activity, or an enzyme having serine aminotransferase activity is encoded by a nucleic acid sequence set forth in SEQ ID NO: 229. In some embodiments, the enzyme having phosphoserine aminotransferase activity is Homo sapiens PSAT1, or homolog thereof. In one embodiment, the one or more nucleic acid molecule encoding an enzyme having phosphoserine aminotransferase activity comprises an amino acid sequence set forth in UniProt ID Q9Y617. In another embodiment, the one or more nucleic acid molecule encoding an enzyme having phosphoserine aminotransferase activity is encoded by a nucleic acid sequence set forth in Gene ID 29968.

[0832] In some embodiments, the enzyme having serine aminase activity is encoded by an amino acid sequence having at least 70% sequence identity, having at least 80% sequence identity, or having at least 90% sequence identity to an Arabidopsis thaliana serine-glyoxylate aminotransferase AGT1, Hyphomicrobium methylovorum GM2 serine-glyoxylate aminotransferase sgaA and Methylobacterium extorquens sgaA. In some embodiments, the one or more nucleic acid molecule encoding an enzyme having serine-glyoxylate aminotransferase activity comprises an amino acid sequence selected from UniProt ID Q56YA5 and UniProt ID 008374. In a further embodiment, the one or more nucleic acid molecule encoding an enzyme having serine-glyoxylate aminotransferase activity is encoded by a nucleic acid sequence selected from TAIR accession AT2G13360, GenBank accession D86125.1 and GenBank accession L27235.1.

[0833] In some embodiments, an enzyme having serine aminase activity is an enzyme having serine-pyruvate aminotransferase activity. In some embodiments, the enzyme having serine-pyruvate aminotransferase activity is encoded by an amino acid sequence having at least 70% sequence identity, having at least 80% sequence identity, or having at least 90% sequence identity to Homo sapiens AGXT1. In some embodiments, the enzyme having serine-pyruvate aminotransferase activity is Homo sapiens AGXT1. In some embodiments, the one or more nucleic acid molecules encoding the enzyme having serine-pyruvate aminotransferase activity is AGXT1, or homolog thereof. In some embodiments, the one or more nucleic acid molecules encoding an enzyme having serine-pyruvate aminotransferase activity comprise an amino acid sequence set forth in SEQ ID NO: 244. In a further embodiment, the one or more nucleic acid molecule encoding an enzyme having serine-pyruvate aminotransferase activity is encoded by a nucleic acid sequence set forth in SEQ ID NO: 243.

[0834] In some embodiments, an enzyme having serine aminase activity is an enzyme having alanine-glyoxylate aminotransferase activity. In some embodiments, the enzyme having alanine-glyoxylate aminotransferase activity is encoded by an amino acid sequence having at least 70% sequence identity, having at least 80% sequence identity, or having at least 90% sequence identity to an enzyme having alanine-glyoxylate aminotransferase activity selected from Saccharomyces cerevisiae AGX1, Homo sapiens AGXT2, Arabidopsis thaliana AOAT1 and Arabidopsis thaliana AOAT2. In some embodiments, the one or more nucleic acid molecule encoding an enzyme having alanine-glyoxylate aminotransferase activity comprises an amino acid sequence selected from UniProt ID P43567, UniProt ID Q9BYV1, UniProt ID Q9LR30 and UniProt ID Q9S7E9. In a further embodiment, the one or more nucleic acid molecule encoding an enzyme having alanine-glyoxylate aminotransferase activity is encoded by a nucleic acid sequence selected from Gene ID 850514, Gene ID 64902, TAIR accession AT1G23310 and TAIR accession AT1G70580.

[0835] In some embodiments, an enzyme having serine aminase activity is an enzyme having alanine transaminase activity. In some embodiments, the enzyme having alanine transaminase activity is encoded by an amino acid sequence having at least 70% sequence identity, having at least 80% sequence identity, or having at least 90% sequence identity to an enzyme having alanine transaminase activity selected from E. coli glutamate-pyruvate aminotransferase alaA, E. coli glutamate-pyruvate aminotransferase alaB, E. coli glutamate-pyruvate aminotransferase alaC, Homo sapiens alanine aminotransferase 1 (GPT), Homo sapiens alanine aminotransferase 2 (GPT2), Arenicola marina alanine transaminase, Arabidopsis thaliana tryptophan aminotransferase TAA1, Arabidopsis thaliana AOAT1, Arabidopsis thaliana AOAT2, Candida maltosa alanine aminotransferase, Clostridium propionicum alanine aminotransferase, Pyrococcus furiosus alanine aminotransferase aat, Megathyrsus maximus alanine transaminase, and Panicum miliaceum alanine transaminase AlaAT-2. In some embodiments, the one or more nucleic acid molecule encoding an enzyme having alanine transaminase activity comprises an amino acid sequence selected from UniProt ID P0A959, UniProt ID P77434, UniProt ID P24298, UniProt ID Q8TD30, UniProt ID Q9S7N2, UniProt ID Q9LR30, UniProt ID Q9S7E9, UniProt ID Q9P9M8, and UniProt ID P34106. In a further embodiment, the one or more nucleic acid molecule encoding an enzyme having alanine transaminase activity is encoded by a nucleic acid sequence selected from Gene ID 946772, Gene ID 946850, Gene ID 2875, Gene ID 84706, Gene ID 843393, TAIR accession AT1G23310, TAIR accession AT1G70580, GenBank accession AF163769.1 and GenBank accession X69421.1.

### Diaminobutyrate Decarboxylase (EC 4.1.1.86)

[0836] The present disclosure describes enzymes that can catalyze the following reaction:

[0837] L-2,4-diaminobutanoate↔propane-1,3-diamine+CO₂

[0838] The systematic name of this enzyme class is L-2,4-diaminobutanoate carboxy-lyase (propane-1,3-diamine-forming). Diaminobutyrate decarboxylase may also be known as DABA DC, L-2,4-diaminobutyrate decarboxylase, L-2,4-diaminobutanoate carboxy-lyase.

[0839] This enzyme belongs to the family of transferases, specifically those transferring phosphorus-containing groups (phosphotransferases) with an alcohol group as acceptor. This enzyme participates in 3 metabolic pathways: serine/glycine/threonine metabolism, glycerolipid metabolism, and glyoxylate-dicarboxylate metabolism.

[0840] In some embodiments, a gene encoding a L-2,4-diaminobutyrate decarboxylase is the rhbB gene of Sinorhizobium meliloti Rm2011. The rhbB gene is homologous to the ddc gene of Acinetobacter baumannii, which are involved in the production of propane-1,3-diamine by that organism. Thus, it is proposed that these genes encode diaminobutyrate-2-oxoglutarate transaminase and L-2,4-diaminobutyrate decarboxylase, respectively.

[0841] In some embodiments, the diaminobutyrate decarboxylase is the L-2,4-diaminobutyrate decarboxylase. In some embodiments, the L-2,4-diaminobutyrate decarboxylase is encoded by an amino acid sequence having at least 70% sequence identity, having at least 80% sequence identity, or having at least 90% sequence identity to Sinorhizobium meliloti Rm2011 rhbB. In some embodiments, the L-2,4-diaminobutyrate decarboxylase is Sinorhizobium meliloti Rm2011 rhbB.

[0842] In some embodiments, the one or more nucleic acid molecules encoding the L-2,4-diaminobutyrate decarboxylase is rhbB, or homolog thereof. In some embodiments, the one or more nucleic acid molecule encoding L-2,4-diaminobutyrate decarboxylase comprises an amino acid sequence set forth in UniProt ID Q9Z3R2. In a further embodiment, the one or more nucleic acid molecule encoding L-2,4-diaminobutyrate decarboxylase is encoded by a nucleic acid sequence set forth in Gene ID 1236295.

### Ornithine Decarboxylase (EC 4.1.1.17)

[0843] The present disclosure describes enzymes that can catalyze the following reaction:

[0844] L-omithine+H⁺↔CO₂+putrescine

[0845] The systematic name of this enzyme class is L-omithine carboxy-lyase (putrescine-forming). Ornithine decarboxylase may also be known as SpeC and L-orinithine carboxy-lyase. E. coli encodes two ornithine decarboxylase enzymes, the biosynthetic (constitutive) SpeC and the degradative (inducible) SpeF. SpeF is activated by the guanosine nucleotides GTP, GDP, pppGpp and ppGpp. SpeF is overproduced from a speF-containing plasmid when cells are grown at pH 5.2, but not at pH 7. Overexpression of RNase III from a plasmid increases expression from the speF promoter, perhaps by processing of the 5′ UTR.

[0846] When ornithine is available, E. coli is able to synthesize putrescine via two pathways. One pathway yields putrescine directly from ornithine by a reaction catalyzed by ornithine decarboxylase. The other pathway involves two reactions using arginine. In addition, E. coli possesses two forms of ornithine decarboxylase, a biosynthetic (or constitutive) form apparently present in all strains, and a biodegradative (or inducible) form which is present in some strains of E. coli. These two types of ornithine decarboxylases have been characterized in E. coli K-12. The biodegradative ornithine decarboxylase is induced by low pH and by the presence of omithine in the growth medium. The activity of the biosynthetic ornithine decarboxylases is modulated by a number of positive and negative effectors. The positive effectors include nucleotides, GTP being more effective in activating ornithine decarboxylase, while ppGpp reacts as a negative effector of ornithine decarboxylase. The accumulation of ppGpp leads to the cessation of stable RNA synthesis and appears to be related to the fidelity of protein synthesis.

[0847] Ornithine decarboxylase regulation was reported to occur by a protein inhibitor named antizyme that binds to ornithine decarboxylase and non-competitively inhibits its activity. The antizyme is induced by polyamines. The gene encoding E. coli antizyme was cloned and identified as a bifunctional antizyme/transcriptional regulator. However another publication concluded that the E. coli antizyme is not a direct counterpart of mammalian antizyme genes. The product of E. coli gene atoC (see AtoC transcriptional activator; Az protein inhibitor of ODC) was later identified as the bifunctional protein that has both antizyme activity (posttranslational inhibition of polyamine biosynthetic enzymes) and activity as a transcriptional regulator of genes involved in short-chain fatty acid catabolism. Polyamines activated transcription of atoC. AtoC along with sensory histidine kinase AtoS is part of a two-component signal transduction system. Although AtoS-catalyzed phosphorylation of AtoC is essential for transcriptional activation of the atoDAEB operon for catabolism of short chain fatty acids, it is not yet known whether phosphorylation of antizyme plays a role in regulation of ornithine decarboxylase.

[0848] In some embodiments, genes encoding an ornithine decarboxylase are the speC and speF genes of Escherichia coli. In some embodiments, the ornithine decarboxylase is the L-ornithine decarboxylase. In some embodiments, the ornithine decarboxylase is encoded by an amino acid sequence having at least 70% sequence identity, having at least 80% sequence identity, or having at least 90% sequence identity to Escherichia coli speC or speF. In some embodiments, the ornithine decarboxylase is Escherichia coli speC or speF.

[0849] In some embodiments, the one or more nucleic acid molecules encoding the omithine decarboxylase is speC, or homolog thereof. In some embodiments, the one or more nucleic acid molecules encoding the omithine decarboxylase is speF, or homolog thereof. In some embodiments, the one or more nucleic acid molecules encoding omithine decarboxylase comprise an amino acid sequence selected from UniProt ID P21169 and UniProt ID P24169. In a further embodiment, the one or more nucleic acid molecule encoding ornithine decarboxylase is encoded by a nucleic acid sequence selected from Gene ID 947457 and Gene ID 945297.

### 2,3-Diaminopropionate Ammonia-Lyase (EC 4.3.1.15)

[0850] The present disclosure describes enzymes that can catalyze the following reaction:

[0851] 2 ammonium+pyruvate↔2,3-diaminopropanoate+H₂O

[0852] 2,3-Diaminopropionate ammonia-lyase is not stereospecific and catalyzes the α,β-elimination of both the D and L stereoisomer of 2,3-diaminopropionate. The enzyme also exhibits weak activity toward D-serine, and does not exhibit activity toward L-serine, D-β-Cl-alanine, or L-β-Cl-alanine.

[0853] The enzyme is homodimeric and contains a pyridoxal 5′-phosphate prosthetic group, belonging to the fold-type II family of PLP-containing enzymes. Crystal structures of the apo- and holoenzyme and the enzyme in complex with a reaction intermediate and substrate have been solved. Kinetic properties of mutants in active site residues were analyzed, and a reaction mechanism was proposed.

[0854] In some embodiments, an enzyme having 2,3-diaminopropionate ammonia-lyase activity is encoded by an amino acid sequence having at least 70% sequence identity, having at least 80% sequence identity, or having at least 90% sequence identity to E. coli 2,3-diaminopropionate ammonia-lyase ygeX. In other embodiments, the enzyme having 2,3-diaminopropionate ammonia-lyase activity is E. coli ygeX. In some embodiments, the one or more nucleic acid molecule encoding an enzyme having 2,3-diaminopropionate ammonia-lyase activity comprises an amino acid sequence set forth in UniProt ID P66899. In further embodiments, the one or more nucleic acid molecule encoding an enzyme having 2,3-diaminopropionate ammonia-lyase activity is encoded by a nucleic acid sequence set forth in Gene ID 947012.

### Glyoxylate Shunt

[0855] The glyoxylate cycle, a variation of the tricarboxylic acid cycle, is an anabolic pathway occurring in plants, bacteria, protists, and fungi. The glyoxylate cycle centers on the conversion of acetyl-CoA to succinate for the synthesis of carbohydrates. In microorganisms, the glyoxylate cycle allows cells to utilize simple carbon compounds as a carbon source when complex sources such as glucose are not available. The cycle is generally assumed to be absent in animals, with the exception of nematodes at the early stages of embryogenesis. In recent years, however, the detection of malate synthase and isocitrate lyase, key enzymes involved in the glyoxylate cycle, in some animal tissue has raised questions regarding the evolutionary relationship of enzymes in bacteria and animals and suggests that animals encode alternative enzymes of the cycle that differ in function from known malate synthase and isocitrate lyase in non-metazoan species.

[0856] The glyoxylate cycle utilizes five of the eight enzymes associated with the tricarboxylic acid cycle: citrate synthase, aconitase, succinate dehydrogenase, fumarase, and malate dehydrogenase. The two cycles differ in that in the glyoxylate cycle, isocitrate is converted into glyoxylate and succinate by isocitrate lyase instead of into α-ketoglutarate. This bypasses the decarboxylation steps that take place in the TCA cycle, allowing simple carbon compounds to be used in the later synthesis of macromolecules, including glucose. Glyoxylate is subsequently combined with acetyl-CoA to produce malate, catalyzed by malate synthase. Malate is also formed in parallel from succinate by the action of succinate dehydrogenase and fumarase.

[0857] Fatty acids from lipids are commonly used as an energy source by vertebrates as fatty acids are degraded through beta oxidation into acetate molecules. This acetate, bound to the active thiol group of coenzyme A, enters the citric acid cycle (TCA cycle) where it is fully oxidized to carbon dioxide. This pathway thus allows cells to obtain energy from fat. To utilize acetate from fat for biosynthesis of carbohydrates, the glyoxylate cycle, whose initial reactions are identical to the TCA cycle, is used.

[0858] Cell-wall containing organisms, such as plants, fungi, and bacteria, require very large amounts of carbohydrates during growth for the biosynthesis of complex structural polysaccharides, such as cellulose, glucans, and chitin. In these organisms, in the absence of available carbohydrates (for example, in certain microbial environments or during seed germination in plants), the glyoxylate cycle permits the synthesis of glucose from lipids via acetate generated in fatty acid β-oxidation.

[0859] The glyoxylate cycle bypasses the steps in the citric acid cycle where carbon is lost in the form of CO₂. The two initial steps of the glyoxylate cycle are identical to those in the citric acid cycle: acetate→citrate→isocitrate. In the next step, catalyzed by the first glyoxylate cycle enzyme, isocitrate lyase, isocitrate undergoes cleavage into succinate and glyoxylate (the latter gives the cycle its name). Glyoxylate condenses with acetyl-CoA (a step catalyzed by malate synthase), yielding malate. Both malate and oxaloacetate can be converted into phosphoenolpyruvate, which is the product of phosphoenolpyruvate carboxykinase, the first enzyme in gluconeogenesis. The net result of the glyoxylate cycle is therefore the production of glucose from fatty acids. Succinate generated in the first step can enter into the citric acid cycle to eventually form oxaloacetate.

### Biosynthesis of MEG (or Glycolic Acid), or Optionally, MEG (or Glycolic Acid) and One or More Co-Product Using a Recombinant Microorganism

[0860] As discussed above, in one aspect, the present disclosure provides a recombinant microorganism comprising one or more biochemical pathway that produces monoethylene glycol (MEG) (or glycolic acid) from one or more hexose feedstock via one or more pentose-5-phosphate intermediate. In one embodiment, one or more co-product is co-produced with MEG (or glycolic acid). In another embodiment, the one or more pentose-5-phosphate intermediate is one or more of D-xylulose-5-phosphate, D-ribulose-5-phosphate or D-ribose-5-phosphate.

[0861] Therefore, in one embodiment, the application relates to a recombinant microorganism comprising one or more biochemical pathway comprising at least one enzyme having an activity that converts one or more hexose feedstock in a lossless conversion to one or more pentose-5-phosphate intermediate.

[0862] In some embodiments, the recombinant microorganism comprises expression of at least one enzyme having transketolase activity. In some embodiments, the enzyme having transketolase activity is encoded by an amino acid sequence having at least 70% sequence identity, at least 80% sequence identity, or at least 90% sequence identity to tktA from E. coli. In other embodiments, the enzyme having transketolase activity is tktA from E. coli. In some embodiments, the enzyme having transketolase activity is encoded by an amino acid sequence having at least 70% sequence identity at least 80% sequence identity, or at least 90% sequence identity to tktB from E. coli. In other embodiments, the enzyme having transketolase activity is tktB from E. coli. In another embodiment, the one or more nucleic acid molecules encoding the enzyme having transketolase activity comprises an amino acid sequence selected from the group consisting of SEQ ID NOs: 148 and 150. In some embodiments, the one or more nucleic acid molecules encoding the enzyme having transketolase activity is tktA, or homolog thereof. In some embodiments, the one or more nucleic acid molecules encoding the enzyme having transketolase activity is tktB, or homolog thereof. In a further embodiment, the one or more nucleic acid molecule encoding the enzyme having transketolase activity is encoded by a nucleic acid sequence selected from the group consisting of SEQ ID NOs: 147 and 149.

[0863] In some embodiments, the recombinant microorganism comprises expression of at least one enzyme having transaldolase activity. In some embodiments, the enzyme having transaldolase activity is encoded by an amino acid sequence having at least 70% sequence identity, at least 80% sequence identity, or at least 90% sequence identity to talA or talB from E. coli. In some embodiments, the enzyme having transaldolase activity is talA from E. coli. In other embodiments, the enzyme having transaldolase activity is talB from E. coli. In another embodiment, the one or more nucleic acid molecules encoding the enzyme having transaldolase activity comprises an amino acid sequence selected from the group consisting of SEQ ID NOs: 152 and 154. In a further embodiment, the one or more nucleic acid molecule encoding the enzyme having transaldolase activity is encoded by a nucleic acid sequence selected from the group consisting of SEQ ID NOs: 151 and 153.

[0864] In some embodiments, the recombinant microorganism comprises expression of at least one enzyme having ribulose-5-phosphate 3-epimerase activity. In some embodiments, the enzyme having ribulose-5-phosphate 3-epimerase activity is encoded by an amino acid sequence having at least 70% sequence identity, at least 80% sequence identity, or at least 90% sequence identity to rpe from E. coli. In other embodiments, the enzyme having ribulose-5-phosphate 3-epimerase activity is rpe from E. coli. In another embodiment, the one or more nucleic acid molecules encoding the enzyme having ribulose-5-phosphate 3-epimerase activity comprise an amino acid sequence set forth in SEQ ID NO: 158. In a further embodiment, the one or more nucleic acid molecule encoding the enzyme having ribulose-5-phosphate 3-epimerase activity is encoded by a nucleic acid sequence set forth in SEQ ID NO: 157.

[0865] In some embodiments, the recombinant microorganism comprises expression of at least one enzyme having ribose-5-phosphate isomerase activity. In some embodiments, the enzyme having ribose-5-phosphate isomerase activity is encoded by an amino acid sequence having at least 70% sequence identity, at least 80% sequence identity, or at least 90% sequence identity to rpiA or rpiB from E. coli. In other embodiments, the enzyme having ribose-5-phosphate isomerase activity is rpiA or rpiB from E. coli. In another embodiment, the one or more nucleic acid molecules encoding the rpiA enzyme having ribose-5-phosphate isomerase activity comprise an amino acid sequence set forth in SEQ ID NO: 156. In a further embodiment, the one or more nucleic acid molecule encoding the rpiA enzyme having ribose-5-phosphate isomerase activity is encoded by a nucleic acid sequence set forth in SEQ ID NO: 155. In another embodiment, the one or more nucleic acid molecules encoding the rpiB enzyme having ribose-5-phosphate isomerase activity comprise an amino acid sequence set forth in SEQ ID NO: 253. In a further embodiment, the one or more nucleic acid molecule encoding the rpiB enzyme having ribose-5-phosphate isomerase activity is encoded by a nucleic acid sequence set forth in SEQ ID NO: 254.

[0866] In some embodiments, the recombinant microorganism comprises expression of at least one enzyme having a transketolase activity, a transaldolase activity, a ribulose-5-phosphate 3-epimerase activity, and a ribose-5-phosphate isomerase activity. In other embodiments, the recombinant microorganism further comprises a deleted or diminished activity in one or more endogenous enzymes selected from glyceraldehyde 3-phosphate dehydrogenase, phosphoglycerate kinase and phosphoglycerate mutase. In some embodiments, the endogenous glyceraldehyde 3-phosphate dehydrogenase enzyme is gapA, the phosphoglycerate kinase is pgk and the phosphoglycerate mutase is gpmA and/or gpmM.

[0867] In some embodiments, the recombinant microorganism comprises expression of at least one enzyme having fructose-6-phosphate phosphoketolase activity. In some embodiments, an enzyme having fructose-6-phosphate phosphoketolase activity is encoded by an amino acid sequence having at least 70% sequence identity, at least 80% sequence identity, or at least 90% sequence identity to an enzyme having fructose-6-phosphate phosphoketolase activity selected from the group consisting of Bifidobacterium dentium BDP 1006, Bifidobacterium lactis xfp, Lactobacillus paraplantarum xpkA and Bifidobacterium breve xfp. In a preferred embodiment, an enzyme having fructose-6-phosphate phosphoketolase activity is selected from the group consisting of Bifidobacterium dentium BDP 1006, Bifidobacterium lactis xfp, Lactobacillus paraplantarum xpkA and Bifidobacterium breve xfp. In another embodiment, the one or more nucleic acid molecules encoding the enzyme having fructose-6-phosphate phosphoketolase activity comprise an amino acid sequence selected from the group consisting of SEQ ID NOs: 212, 214, 216 and 218. In a further embodiment, the one or more nucleic acid molecule encoding the enzyme having fructose-6-phosphate phosphoketolase activity is encoded by a nucleic acid sequence selected from the group consisting of SEQ ID NOs: 211, 213, 215 and 217.

[0868] In some embodiments, the recombinant microorganism comprises expression of at least one enzyme having phosphate acetyltransferase activity. In some embodiments, an enzyme having phosphate acetyltransferase activity is encoded by an amino acid sequence having at least 70% sequence identity, at least 80% sequence identity, or at least 90% sequence identity to an enzyme having phosphate acetyltransferase activity selected from E. coli pta and Clostridium acetobutylicum pta. In a preferred embodiment, an enzyme having phosphate acetyltransferase activity is selected from E. coli pta and Clostridium acetobutylicum pta. In another embodiment, the one or more nucleic acid molecules encoding the enzyme having phosphate acetyltransferase activity comprise an amino acid sequence selected from SEQ ID NOs: 220 and 222. In a further embodiment, the one or more nucleic acid molecule encoding the enzyme having phosphate acetyltransferase activity is encoded by a nucleic acid sequence selected from SEQ ID NOs: 219 and 221.

[0869] In some embodiments, the recombinant microorganism comprises expression of at least one enzyme having a fructose-6-phosphate phosphoketolase activity, a phosphate acetyltransferase activity, a transketolase activity, a transaldolase activity, a ribulose-5-phosphate 3-epimerase activity, and a ribose-5-phosphate isomerase activity. In other embodiments, the recombinant microorganism further comprises a deleted or diminished activity in an endogenous 6-phosphofructokinase enzyme. In some embodiments, the endogenous 6-phosphofructokinase enzyme is pfkA and/or pfkB.

[0870] In another embodiment, the one or more pentose-5-phosphate intermediate produced in the lossless conversion of one or more hexose feedstock can be connected with any one of the known C2 MEG or glycolic acid production pathways by conversion of the one or more pentose-5-phosphate intermediate to one or more pentose and/or pentose-1-phosphate intermediate. In some embodiments, the recombinant microorganism comprises expression of at least one enzyme having a pentose phosphatase activity, an arabitol phosphate dehydrogenase activity, and/or a phosphopentomutase activity.

[0871] In some embodiments, the recombinant microorganism comprises expression of at least one enzyme having pentose phosphatase activity. In other embodiments, the at least one enzyme having pentose phosphatase activity is selected from one or more of an enzyme having D-pentose-5-phosphatase activity, an enzyme having D-xylulose-5-phosphatase activity, an enzyme having D-ribose-5-phosphatase activity, and an enzyme having D-ribulose-5-phosphatase activity. In some embodiments, the pentose phosphatase is encoded by an amino acid sequence having at least 70% sequence identity, at least 80% sequence identity, or at least 90% sequence identity to a D-pentose-5-phosphatase selected from the group consisting of E. coli phoA, E. coli yfbT and E. coli yidA. In some embodiments, the enzyme having D-xylulose-5-phosphatase activity is encoded by an amino acid sequence having at least 70% sequence identity, at least 80% sequence identity, or at least 90% sequence identity to Bacillus subtilis araL. In some embodiments, the enzyme having D-ribose-5-phosphatase activity is encoded by an amino acid sequence having at least 70% sequence identity, at least 80% sequence identity, or at least 90% sequence identity to an enzyme having D-ribose-5-phosphatase activity selected from the group consisting of Arabidopsis thaliana SGPP, Pseudomonas fluorescens PFLU 2693, and E. coli ybiV. In some embodiments, the enzyme having D-ribulose-5-phosphatase activity is encoded by an amino acid sequence having at least 70% sequence identity, at least 80% sequence identity, or at least 90% sequence identity to Plasmodium falciparum PF10_0325. In some embodiments, the one or more nucleic acid molecules encoding the enzyme having D-pentose-5-phosphatase activity is selected from the group consisting of SEQ ID NOs: 159, 161, 163, 165, 167, 169, 171 and 173. In another embodiment, the one or more nucleic acid molecules encoding the enzyme having D-pentose-5-phosphatase activity comprise an amino acid sequence selected from the group consisting of SEQ ID NOs: 160, 162, 164, 166, 168, 170, 172 and 174.

[0872] In some embodiments, the recombinant microorganism comprises expression of at least one enzyme having arabitol phosphate dehydrogenase activity. In some embodiments, the enzyme having arabitol phosphate dehydrogenase activity is selected from one or more of an enzyme having D-arabitol 1-phosphate 4-dehydrogenase activity, an enzyme having D-arabitol 5-phosphate 2-dehydrogenase activity, an enzyme having D-arabitol 1-phosphate 2-dehydrogenase activity and an enzyme having D-arabitol 5-phosphate 4-dehydrogenase activity.

[0873] In some embodiments, an enzyme having D-arabitol 1-phosphate 4-dehydrogenase activity is encoded by an amino acid sequence having at least 70% sequence identity, at least 80% sequence identity, or at least 90% sequence identity to APDH from Enterococcus avium. In a preferred embodiment, an enzyme having D-arabitol 1-phosphate 4-dehydrogenase activity is APDH from Enterococcus avium. In some embodiments, the one or more nucleic acid molecules encoding an enzyme having D-arabitol 1-phosphate 4-dehydrogenase activity is set forth in SEQ ID NO: 175. In another embodiment, the one or more nucleic acid molecules encoding an enzyme having D-arabitol 1-phosphate 4-dehydrogenase activity comprise an amino acid sequence set forth in SEQ ID NO: 176.

[0874] In some embodiments, an enzyme having D-arabitol 5-phosphate 2-dehydrogenase activity is encoded by an amino acid sequence having at least 70% sequence identity, at least 80% sequence identity, or at least 90% sequence identity to APDH from Enterococcus avium. In a preferred embodiment, an enzyme having D-arabitol 5-phosphate 2-dehydrogenase activity is APDH from Enterococcus avium. In some embodiments, the one or more nucleic acid molecules encoding an enzyme having D-arabitol 5-phosphate 2-dehydrogenase activity is set forth in SEQ ID NO: 175. In another embodiment, the one or more nucleic acid molecules encoding an enzyme having D-arabitol 5-phosphate 2-dehydrogenase activity comprise an amino acid sequence set forth in SEQ ID NO: 176.

[0875] In some embodiments, an enzyme having D-arabitol 1-phosphate 2-dehydrogenase activity is encoded by an amino acid sequence having at least 70% sequence identity, at least 80% sequence identity, or at least 90% sequence identity to an enzyme having D-arabitol 1-phosphate 2-dehydrogenase activity selected from the group consisting of Candida albicans ARD1, Candida tropicalis ARD1, Scheffersomyces stipitis ARDH, Bacillus subtilis egsA (araM), Aeropyrum pernix egsA, E. coli gpsA and Saccharomyces cerevisiae GPD1. In a preferred embodiment, an enzyme having D-arabitol 1-phosphate 2-dehydrogenase activity is selected from the group consisting of Candida albicans ARD1, Candida tropicalis ARD1, Scheffersomyces stipitis ARDH, Bacillus subtilis egsA (araM), Aeropyrum pernix egsA, E. coli gpsA and Saccharomyces cerevisiae GPD1. In some embodiments, the one or more nucleic acid molecules encoding an enzyme having D-arabitol 1-phosphate 2-dehydrogenase activity is selected from the group consisting of SEQ ID NOs: 177, 179, 181, 189, 191, 193 and 195. In another embodiment, the one or more nucleic acid molecules encoding an enzyme having D-arabitol 1-phosphate 2-dehydrogenase activity comprise an amino acid sequence selected from the group consisting of SEQ ID NOs: 178, 180, 182, 190, 192, 194 and 196.

[0876] In some embodiments, an enzyme having D-arabitol 5-phosphate 4-dehydrogenase activity is encoded by an amino acid sequence having at least 70% sequence identity, at least 80% sequence identity, or at least 90% sequence identity to an enzyme having D-arabitol 5-phosphate 4-dehydrogenase activity selected from the group consisting of Pseudomonas fluorescens mtlD, Klebsiella pneumoniae dalD, Ralstonia solanacearum dalD, Bacillus subtilis egsA (araM), Aeropyrum pernix egsA, E. coli gpsA and Saccharomyces cerevisiae GPD1. In a preferred embodiment, an enzyme having D-arabitol 5-phosphate 4-dehydrogenase activity is selected from the group consisting of Pseudomonas fluorescens mtlD, Klebsiella pneumoniae dalD, Ralstonia solanacearum dalD, Bacillus subtilis egsA (araM), Aeropyrum pernix egsA, E. coli gpsA and Saccharomyces cerevisiae GPD1. In some embodiments, the one or more nucleic acid molecules encoding an enzyme having D-arabitol 5-phosphate 4-dehydrogenase activity is selected from the group consisting of SEQ ID NOs: 183, 185, 187, 189, 191, 193 and 195. In another embodiment, the one or more nucleic acid molecules encoding an enzyme having D-arabitol 5-phosphate 4-dehydrogenase activity comprise an amino acid sequence selected from the group consisting of SEQ ID NOs: 184, 186, 188, 190, 192, 194 and 196.

[0877] In some embodiments, the recombinant microorganism comprises expression of at least one enzyme having phosphopentomutase activity. In some embodiments, an enzyme having phosphopentomutase activity is encoded by an amino acid sequence having at least 70% sequence identity, at least 80% sequence identity, or at least 90% sequence identity to an enzyme having phosphopentomutase activity selected from the group consisting of E. coli deoB, E. coli pgm, Bacillus subtilis pgcA, Lactococcus lactis pgmB, E. coli ycjU, Pseudomonas aeruginosa algC, and E. coli cpsG. In a preferred embodiment, an enzyme having phosphopentomutase activity is selected from the group consisting of E. coli deoB, E. coli pgm, Bacillus subtilis pgcA, Lactococcus lactis pgmB, E. coli ycjU, Pseudomonas aeruginosa algC, and E. coli cpsG. In some embodiments, the one or more nucleic acid molecules encoding an enzyme having phosphopentomutase activity is selected from the group consisting of SEQ ID NOs: 197, 199, 201, 203, 205, 207 and 209. In another embodiment, the one or more nucleic acid molecules encoding an enzyme having phosphopentomutase activity comprise an amino acid sequence selected from the group consisting of SEQ ID NOs: 198, 200, 202, 204, 206, 208 and 210.

[0878] In some embodiments of any of the recombinant microorganisms described above, the recombinant microorganism further comprises a diminished activity in one or more endogenous enzymes selected from glucose 6-phosphate-1-dehydrogenase, 6-phosphogluconolactonase, and 6-phosphogluconate dehydrogenase. In further embodiments, the glucose 6-phosphate-1-dehydrogenase is zwf, the 6-phosphogluconolactonase is pgl, and the 6-phosphogluconate dehydrogenase is gnd.

[0879] In some embodiments, the application provides for a recombinant microorganism that co-produces MEG (or glycolic acid) and one or more co-product selected from acetone, isopropanol, propene, isobutene and one or more serine pathway compounds. In some preferred embodiments, the one or more serine pathway compounds is selected from serine, glycine, monoethanolamine (MEA) and ethylenediamine (EDA).

[0880] In some embodiments, the one or more hexose feedstock is selected from glucose or oligomers of glucose thereof. In other embodiments, the oligomers of glucose are selected from fructose, sucrose, starch, cellobiose, maltose, lactose and cellulose.

[0881] In some embodiments, the expression of an enzyme having transketolase activity or an enzyme having fructose-6-phosphate phosphoketolase activity in the recombinant microorganism enables a lossless conversion of one or more hexose feedstock to one or more pentose-5-phosphate intermediate.

[0882] In some embodiments, the recombinant microorganism produces MEG or glycolic acid (GA) through the conversion of glycolaldehyde in a C2 pathway and through the conversion of dihydroxyacetone phosphate (DHAP) or pyruvate in a C3 pathway. In other embodiments, the glycolaldehyde is oxidized to glycolic acid by a glycolaldehyde dehydrogenase.

[0883] In some embodiments, the at least one enzyme for the production of MEG or GA through the conversion of DHAP or pyruvate in a C3 pathway are selected from at least one enzyme having an activity selected from a 3-phosphoglycerate dehydrogenase activity, a phosphoserine aminotransferase activity, a 3-phosphohydroxypyruvate phosphatase activity, a phosphoserine phosphatase activity, a serine transaminase activity, a hydroxypyruvate decarboxylase activity, a 3-phosphohydroxypyruvate reductase activity, a glycolaldehyde reductase activity, a glycolaldehyde dehydrogenase activity, a serine oxidoreductase (deaminating) or serine-pyruvate aminotransferase activity, a serine decarboxylase activity, an ethanolamine aminotransferase or ethanolamine oxidoreductase (deaminating) activity, a glycerate decarboxylase activity, a hydroxypyruvate reductase activity, a 3-phosphoglycerate phosphatase activity, a 2-phosphoglycerate phosphatase activity, a glycerate 3-kinase activity, and a glycerate 2-kinase activity.

[0884] In some embodiments, the recombinant microorganism produces MEG or glycolic acid (GA) through the conversion of glycolaldehyde in a C2 pathway and produces one or more co-product through the conversion of dihydroxyacetone phosphate (DHAP) or pyruvate in a C3 pathway. In other embodiments, the one or more co-product is selected from acetone, isopropanol, propene, isobutene and one or more serine pathway compounds. In some preferred embodiments, the one or more serine pathway compounds is selected from serine, glycine, monoethanolamine (MEA) and ethylenediamine (EDA).

[0885] In some embodiments, the at least one enzyme for the production of one or more co-product through the conversion of DHAP or pyruvate in a C3 pathway are selected from at least one enzyme having an activity selected from a thiolase or acetyl coenzyme A acetyltransferase activity, an acetyl-CoA:acetoacetate transferase or acetate:acetoacetyl-CoA hydrolase activity, and an acetoacetate decarboxylase activity, and the one or more co-product comprises acetone.

[0886] In some embodiments, the at least one enzyme for the production of one or more co-product through the conversion of DHAP or pyruvate in a C3 pathway are selected from at least one enzyme having an activity selected from a thiolase or acetyl coenzyme A acetyltransferase activity, an acetyl-CoA:acetoacetate transferase or acetate:acetoacetyl-CoA hydrolase activity, an acetoacetate decarboxylase activity, and a secondary alcohol dehydrogenase activity, and the one or more co-product comprises isopropanol.

[0887] In some embodiments, the at least one enzyme for the production of one or more co-product through the conversion of DHAP or pyruvate in a C3 pathway are selected from at least one enzyme having an activity selected from a thiolase or acetyl coenzyme A acetyltransferase activity, an acetyl-CoA:acetoacetate transferase or acetate:acetoacetyl-CoA hydrolase activity, an acetoacetate decarboxylase activity, a secondary alcohol dehydrogenase activity, and a dehydratase activity, and the one or more co-product comprises propene.

[0888] In some embodiments, the at least one enzyme for the production of one or more co-product through the conversion of DHAP or pyruvate in a C3 pathway are selected from at least one enzyme having an activity selected from a thiolase or acetyl coenzyme A acetyltransferase activity, an acetyl-CoA:acetoacetate transferase or acetate:acetoacetyl-CoA hydrolase activity, an acetoacetate decarboxylase activity, a 3-hydroxyisovalerate (3HIV) synthase activity, a hydroxymethylglutaryl-CoA synthase activity, a methylglutaconyl-CoA hydratase activity, a methylcrotonyl-CoA carboxylase activity, a methylcrotonyl-CoA hydratase activity, a 3-hydroxyisovaleryl-CoA thioesterase activity, a 3HIV kinase activity, a 3HIV-3-phosphate decarboxylase activity, and a 3HIV decarboxylase activity, and the one or more co-product comprises isobutene.

[0889] In some embodiments, the at least one enzyme for the production of one or more co-product through the conversion of DHAP or pyruvate in a C3 pathway are selected from at least one enzyme having an activity selected from a 3-phosphoglycerate dehydrogenase activity, a phosphoserine aminotransferase activity, a 3-phosphohydroxypyruvate phosphatase activity, a phosphoserine phosphatase activity, a serine oxidoreductase (deaminating) or serine-pyruvate aminotransferase activity, a hydroxypyruvate reductase activity, a 3-phosphoglycerate phosphatase activity, a 2-phosphoglycerate phosphatase activity, a glycerate 3-kinase activity, and a glycerate 2-kinase activity, and wherein the one or more co-product comprises L-serine.

[0890] In some embodiments, the at least one enzyme for the production of one or more co-product through the conversion of DHAP or pyruvate in a C3 pathway are selected from at least one enzyme having an activity selected from a serine hydroxymethyltransferase activity, a transferase activity, a formaldehyde dehydrogenase activity, a formate dehydrogenase activity, an activity associated with glycine cleavage system, a 3-phosphoglycerate dehydrogenase activity, a phosphoserine aminotransferase activity, a 3-phosphohydroxypyruvate phosphatase activity, a phosphoserine phosphatase activity, a serine transaminase activity, a hydroxypyruvate decarboxylase activity, a serine oxidoreductase (deaminating) activity, a serine decarboxylase activity, an ethanolamine aminotransferase or ethanolamine oxidoreductase (deaminating) activity, a hydroxypyruvate reductase activity, a 3-phosphoglycerate phosphatase activity, a 2-phosphoglycerate phosphatase activity, a glycerate 3-kinase activity, a glycerate 2-kinase activity, a glycolaldehyde dehydrogenase activity, a glycolate dehydrogenase activity, an alanine-glyoxylate aminotransferase activity, an alanine transaminase activity, an NAD(P)H dependent glutamate dehydrogenase activity, and wherein the one or more co-product comprises glycine. In another embodiment, the activity associated with glycine cleavage system comprise an enzyme or protein selected from a glycine decarboxylase (P protein), an aminomethyltransferase (T protein), a dihydrolipoamide dehydrogenase (L protein), and an H protein.

[0891] In some embodiments, the at least one enzyme for the production of one or more co-product through the conversion of DHAP or pyruvate in a C3 pathway are selected from at least one enzyme having an activity selected from a 3-phosphoglycerate dehydrogenase activity, a phosphoserine aminotransferase activity, a 3-phosphohydroxypyruvate phosphatase activity, a phosphoserine phosphatase activity, a transaminase activity, a hydroxypyruvate decarboxylase activity, a serine oxidoreductase (deaminating) or serine-pyruvate aminotransferase activity, a serine decarboxylase activity, a hydroxypyruvate reductase activity, a 3-phosphoglycerate phosphatase activity, a 2-phosphoglycerate phosphatase activity, a glycerate 3-kinase activity, a glycerate 2-kinase activity, an acetaldehyde dehydrogenase activity, and an ethanolamine ammonia lyase activity, and the one or more co-product comprises monoethanolamine (MEA).

[0892] In some embodiments, the at least one enzyme for the production of one or more co-product through the conversion of DHAP or pyruvate in a C3 pathway are selected from at least one enzyme having an activity selected from a serine dehydrogenase activity, a 2-aminomalonate semialdehyde decarboxylase activity, an aminoacetaldehyde transaminase activity, a 2-aminomalonate semialdehyde transaminase activity, a 2,3-diaminopropanoate decarboxylase activity, a serine decarboxylase activity, an ethanolamine dehydrogenase activity, a serine hydroxymethyltransferase activity, an aldehyde oxidase activity, an N-acetyl transferase or O-acetyl transferase activity, an N-acetylserine dehydrogenase activity, a transaminase activity, a deacetylase activity, a serine aminase activity, and a 2,3-diaminopropanoate ammonia lyase activity, and the one or more co-product comprises ethylenediamine (EDA).

[0893] In some embodiments, the at least one enzyme for the production of MEG or GA from glycolaldehyde in a C2 pathway are selected from at least one enzyme having an activity selected from a D-tagatose 3-epimerase activity, a D-ribulokinase activity, a D-ribulose-1-phosphate aldolase activity, a D-xylulose 1-kinase activity, a D-xylulose-1-phosphate aldolase activity, a xylose reductase or aldose reductase activity, a xylitol dehydrogenase activity, a xylose isomerase activity, a xylose dehydrogenase activity, a xylonolactonase activity, a xylonate dehydrogenase activity, a 2-keto-3-deoxy-D-pentonate aldolase activity, a glycolaldehyde reductase activity and a glycolaldehyde dehydrogenase activity.

[0894] In some embodiments of any of the recombinant microorganisms described above, the recombinant microorganism further comprises one or more modifications to diminish or delete activity in a glycolaldehyde dehydrogenase, a lactate dehydrogenase, a xylose isomerase, a xylulose kinase or combination thereof.

[0895] In one embodiment, at least a portion of the excess NADH produced in the C3 pathway is used as a source of reducing equivalents in the C2 pathway. In another embodiment, at least a portion of the excess NADH produced in the C3 pathway is used to produce ATP.

[0896] In one embodiment, excess biomass formation is minimized and production of MEG (or glycolic acid) or MEG (or glycolic acid) and one or more co-products is maximized.

[0897] Hexose to Pentose-5-Phosphate Intermediate

[0898] In the present disclosure, glucose flux is funneled into the pentose phosphate pathway instead of the glycolysis pathway by using a non-oxidative entry into the pentose phosphate pathway.

[0899] [A] Therefore, in one embodiment, the application relates to a recombinant microorganism capable of producing one or more pentose-5-phosphate intermediate from one or more hexose feedstock, wherein the recombinant microorganism expresses one or more of the following from (a) to (d):

[0900] (a) at least one endogenous or exogenous nucleic acid molecule encoding an enzyme having transketolase activity that catalyzes a reversible conversion of fructose-6-phosphate and glyceraldehyde-3-phosphate to erythrose-4-phosphate and D-xylulose-5-phosphate, respectively, and/or that catalyzes a reversible conversion of glyceraldehyde-3-phosphate from (b) and seduheptulose-7-phosphate from (b) to D-ribose-5-phosphate and D-xylulose-5-phosphate, respectively;

[0901] (b) at least one endogenous or exogenous nucleic acid molecule encoding an enzyme having transaldolase activity that catalyzes a reversible conversion of fructose-6-phosphate and erythrose-4-phosphate from (a) to glyceraldehyde-3-phosphate and seduheptulose-7-phosphate, respectively;

[0902] (c) at least one endogenous or exogenous nucleic acid molecule encoding an enzyme having ribose-5-phosphate isomerase activity that catalyzes an interconversion of D-ribose-5-phosphate from (a) and D-ribulose-5-phosphate;

[0903] (d) at least one endogenous or exogenous nucleic acid molecule encoding an enzyme having ribulose-5-phosphate 3-epimerase activity that catalyzes an interconversion of D-xylulose-5-phosphate from (a) and D-ribulose-5-phosphate from (c);

wherein the recombinant microorganism optionally further comprises a deletion, insertion, or loss of function mutation in a gene encoding a glyceraldehyde 3-phosphate dehydrogenase;
wherein the one or more hexose feedstock is converted to fructose-6-phosphate and glyceraldehyde-3-phosphate through an endogenous glycolysis pathway in the recombinant microorganism, and wherein the one or more pentose-5-phosphate intermediate produced is one or more of D-ribose-5-phosphate, D-xylulose-5-phosphate or D-ribulose-5-phosphate.

[0904] [B] In another embodiment, the application relates to a recombinant microorganism capable of producing one or more pentose-5-phosphate intermediate from one or more hexose feedstock, wherein the recombinant microorganism expresses one or more of the following from (a) to (f):

[0905] (a) at least one endogenous or exogenous nucleic acid molecule encoding an enzyme having fructose-6-phosphate phosphoketolase activity that catalyzes a reversible conversion of fructose-6-phosphate to erythrose-4-phosphate and acetyl-phosphate;

[0906] (b) at least one endogenous or exogenous nucleic acid molecule encoding an enzyme having phosphate acetyltransferase activity that catalyzes a reversible conversion of acetyl-phosphate from (a) to acetyl-CoA;

[0907] (c) at least one endogenous or exogenous nucleic acid molecule encoding an enzyme having transaldolase activity that catalyzes a reversible conversion of fructose-6-phosphate and erythrose-4-phosphate from (a) to glyceraldehyde-3-phosphate and seduheptulose-7-phosphate, respectively;

[0908] (d) at least one endogenous or exogenous nucleic acid molecule encoding an enzyme having transketolase activity that catalyzes a reversible conversion of glyceraldehyde-3-phosphate from (c) and seduheptulose-7-phosphate from (c) to D-ribose-5-phosphate and D-xylulose-5-phosphate, respectively;

[0909] (e) at least one endogenous or exogenous nucleic acid molecule encoding an enzyme having ribose-5-phosphate isomerase activity that catalyzes an interconversion of D-ribose-5-phosphate from (d) and D-ribulose-5-phosphate;

[0910] (f) at least one endogenous or exogenous nucleic acid molecule encoding an enzyme having ribulose-5-phosphate 3-epimerase activity that catalyzes an interconversion of D-xylulose-5-phosphate from (d) and D-ribulose-5-phosphate from (e);

wherein the recombinant microorganism optionally further comprises a deletion, insertion, or loss of function mutation in a gene encoding a 6-phosphofructokinase;
wherein the one or more hexose feedstock is converted to fructose-6-phosphate through an endogenous glycolysis pathway in the recombinant microorganism,
wherein the acetyl-CoA produced in step (b) can be used to produce one or more co-products selected from acetone, isopropanol, propene, isobutene, and serine pathway compounds;
and wherein the one or more pentose-5-phosphate intermediate produced is one or more of D-ribose-5-phosphate, D-xylulose-5-phosphate or D-ribulose-5-phosphate.

[0911] In some embodiments, the oxidative branch of the pentose phosphate pathway is deleted or inactivated to optimize flux towards the non-oxidative entry into the pentose phosphate pathway.

[0912] [C] Therefore, in one embodiment, the recombinant microorganism of embodiment [A] or embodiment [B] optionally further comprises one or more modifications selected from the group consisting of:

[0913] (i) a deletion, insertion, or loss of function mutation in a gene encoding a glucose 6-phosphate-1-dehydrogenase that catalyzes the conversion of glucose-6-phosphate to 6-phospho-D-glucono-1,5-lactone;

[0914] (ii) a deletion, insertion, or loss of function mutation in a gene encoding a 6-phosphogluconolactonase that catalyzes the conversion of 6-phospho-D-glucono-1,5-lactone to gluconate-6-phosphate; and

[0915] (iii) a deletion, insertion, or loss of function mutation in a gene encoding a 6-phosphogluconate dehydrogenase that catalyzes the conversion of gluconate-6-phosphate to D-ribulose-5-phosphate.

[0916] In some embodiments, the enzyme having transketolase activity is encoded by an amino acid sequence having at least 70% sequence identity, having at least 80% sequence identity, or having at least 90% sequence identity to E. coli tktA. In other embodiments, the transketolase is encoded by an amino acid sequence having at least 70% sequence identity, having at least 80% sequence identity, or having at least 90% sequence identity to E. coli tktB. In some embodiments, the transketolase is E. coli tktA. In other embodiments, the transketolase is E. coli tktB.

[0917] In some embodiments, the one or more nucleic acid molecules encoding the enzyme having transketolase activity is tktA, or homolog thereof. In some embodiments, the one or more nucleic acid molecules encoding the enzyme having transketolase activity is tktB, or homolog thereof. In another embodiment, the one or more nucleic acid molecules encoding the enzyme having transketolase activity comprises an amino acid sequence selected from the group consisting of SEQ ID NOs: 148 and 150. In a further embodiment, the one or more nucleic acid molecule encoding the enzyme having transketolase activity is encoded by a nucleic acid sequence selected from the group consisting of SEQ ID NOs: 147 and 149.

[0918] In some embodiments, the enzyme having transaldolase activity is encoded by an amino acid sequence having at least 70% sequence identity, at least 80% sequence identity, or at least 90% sequence identity to talA or talB from E. coli. In some embodiments, the enzyme having transaldolase activity is talA from E. coli. In other embodiments, the enzyme having transaldolase activity is talB from E. coli. In another embodiment, the one or more nucleic acid molecules encoding the enzyme having transaldolase activity comprises an amino acid sequence selected from the group consisting of SEQ ID NOs: 152 and 154. In a further embodiment, the one or more nucleic acid molecule encoding the enzyme having transaldolase activity is encoded by a nucleic acid sequence selected from the group consisting of SEQ ID NOs: 151 and 153.

[0919] In one embodiment, the enzyme having ribose-5-phosphate isomerase activity is encoded by an amino acid sequence having at least 70% sequence identity, having at least 80% sequence identity, or having at least 90% sequence identity to E. coli rpiA or rpiB. In some embodiments, the enzyme having ribose-5-phosphate isomerase activity is E. coli rpiA or rpiB.

[0920] In some embodiments, the one or more nucleic acid molecules encoding the enzyme having ribose-5-phosphate isomerase activity is rpiA, or homolog thereof. In another embodiment, the one or more nucleic acid molecules encoding an enzyme having ribose-5-phosphate isomerase activity comprise an amino acid sequence set forth in SEQ ID NO: 156. In a further embodiment, the one or more nucleic acid molecule encoding an enzyme having ribose-5-phosphate isomerase activity is encoded by a nucleic acid sequence set forth in SEQ ID NO: 155.

[0921] In one embodiment, the enzyme having ribulose-5-phosphate 3-epimerase activity is encoded by an amino acid sequence having at least 70% sequence identity, having at least 80% sequence identity, or having at least 90% sequence identity to E. coli rpe. In some embodiments, the enzyme having ribulose-5-phosphate 3-epimerase activity is E. coli rpe.

[0922] In some embodiments, the one or more nucleic acid molecules encoding the enzyme having ribulose-5-phosphate 3-epimerase activity is rpe, or homolog thereof. In another embodiment, the one or more nucleic acid molecules encoding the enzyme having ribulose-5-phosphate 3-epimerase activity comprise an amino acid sequence set forth in SEQ ID NO: 158. In a further embodiment, the one or more nucleic acid molecule encoding the enzyme having ribulose-5-phosphate 3-epimerase activity is encoded by a nucleic acid sequence set forth in SEQ ID NO: 157.

[0923] In one embodiment, the enzyme having fructose-6-phosphate phosphoketolase activity is encoded by an amino acid sequence having at least 70% sequence identity, at least 80% sequence identity, or at least 90% sequence identity to an enzyme having fructose-6-phosphate phosphoketolase activity selected from the group consisting of Bifidobacterium dentium BDP 1006, Bifidobacterium lactis xfp, Lactobacillus paraplantarum xpkA and Bifidobacterium breve xfp. In other embodiments, the enzyme having fructose-6-phosphate phosphoketolase activity is selected from the group consisting of Bifidobacterium dentium BDP 1006, Bifidobacterium lactis xfp, Lactobacillus paraplantarum xpkA and Bifidobacterium breve xfp.

[0924] In some embodiments, the one or more nucleic acid molecules encoding the enzyme having fructose-6-phosphate phosphoketolase activity is selected from BDP 1006, xfp, xpkA, or homolog thereof. In another embodiment, the one or more nucleic acid molecules encoding the enzyme having fructose-6-phosphate phosphoketolase activity comprise an amino acid sequence selected from the group consisting of SEQ ID NOs: 212, 214, 216 and 218. In a further embodiment, the one or more nucleic acid molecule encoding the enzyme having fructose-6-phosphate phosphoketolase activity is encoded by a nucleic acid sequence selected from the group consisting of SEQ ID NOs: 211, 213, 215 and 217.

[0925] In one embodiment, the enzyme having phosphate acetyltransferase activity is encoded by an amino acid sequence having at least 70% sequence identity, at least 80% sequence identity, or at least 90% sequence identity to an enzyme having phosphate acetyltransferase activity selected from E. coli pta and Clostridium acetobutylicum pta. In other embodiments, the enzyme having phosphate acetyltransferase activity is selected from E. coli pta and Clostridium acetobutylicum pta.

[0926] In some embodiments, the one or more nucleic acid molecules encoding the enzyme having phosphate acetyltransferase activity is pta, or homolog thereof. In another embodiment, the one or more nucleic acid molecules encoding the enzyme having phosphate acetyltransferase activity comprise an amino acid sequence selected from SEQ ID NOs: 220 and 222. In a further embodiment, the one or more nucleic acid molecule encoding the enzyme having phosphate acetyltransferase activity is encoded by a nucleic acid sequence selected from SEQ ID NOs: 219 and 221.

[0927] Connecting pentose phosphate pathway and MEG (or glycolic acid) production pathways

[0928] In another aspect, a pentose-5-phosphate intermediate produced in embodiment [A] or embodiment [B] (and optionally comprising embodiment [C]) can be connected with any one of the known MEG or glycolic acid production pathways by pentose phosphatases.

[0929] [D] Therefore, in one embodiment, the application relates to a recombinant microorganism capable of producing D-xylulose from D-xylulose-5-phosphate, wherein the recombinant microorganism expresses one or more enzyme having pentose-5-phosphatase activity, wherein the D-xylulose-5-phosphate is produced by non-oxidative branch of pentose phosphate pathway, and wherein the D-xylulose can be used to produce MEG (or glycolic acid) and optionally, one or more co-product.

[0930] In one embodiment, the enzyme having pentose-5-phosphatase activity is encoded by an amino acid sequence having at least 70% sequence identity, at least 80% sequence identity, or at least 90% sequence identity to an enzyme having pentose-5-phosphatase activity selected from the group consisting of E. coli phoA, E. coli yfbT and E. coli yidA. In further embodiments, the enzyme having pentose-5-phosphatase activity is selected from E. coli phoA, E. coli yfbT and E. coli yidA.

[0931] In some embodiments, the one or more nucleic acid molecules encoding the enzyme having pentose-5-phosphatase activity is phoA, yfbT, yidA or homolog thereof. In another embodiment, the one or more nucleic acid molecules encoding the enzyme having pentose-5-phosphatase activity comprises an amino acid sequence selected from the group consisting of SEQ ID NOs: 160, 168 and 172. In a further embodiment, the one or more nucleic acid molecules encoding the enzyme having pentose-5-phosphatase activity is encoded by a nucleic acid sequence selected from the group consisting of SEQ ID NOs: 159, 167 and 171.

[0932] In another embodiment, the pentose-5-phosphatase is a D-xylulose-5-phosphatase. In another embodiment, the D-xylulose-5-phosphatase is encoded by an amino acid sequence having at least 70% sequence identity, at least 80% sequence identity, or at least 90% sequence identity to Bacillus subtilis araL. In further embodiments, the D-xylulose-5-phosphatase is Bacillus subtilis araL.

[0933] In some embodiments, the one or more nucleic acid molecules encoding the enzyme having D-xylulose-5-phosphatase activity is araL, or homolog thereof. In another embodiment, the one or more nucleic acid molecules encoding the enzyme having D-xylulose-5-phosphatase activity comprises an amino acid sequence set forth in SEQ ID NO: 164. In a further embodiment, the one or more nucleic acid molecules encoding the enzyme having D-xylulose-5-phosphatase activity is encoded by a nucleic acid sequence set forth in SEQ ID NO: 163.

[0934] [E] In one embodiment, the application relates to a recombinant microorganism capable of producing D-ribulose from D-ribulose-5-phosphate or from D-ribose-5-phosphate, wherein the recombinant microorganism expresses one or more of the following from (a) to (c):

[0935] (a) at least one endogenous or exogenous nucleic acid molecule encoding an enzyme having D-ribulose-5-phosphatase activity and/or an enzyme having pentose-5-phosphatase activity that catalyzes a reversible conversion of D-ribulose-5-phosphate to D-ribulose;

[0936] (b) at least one endogenous or exogenous nucleic acid molecule encoding an enzyme having D-ribose-5-phosphatase activity and/or an enzyme having pentose-5-phosphatase activity that catalyzes a reversible conversion of D-ribose-5-phosphate to D-ribose;

[0937] (c) at least one endogenous or exogenous nucleic acid molecule encoding an enzyme having D-ribose isomerase activity that catalyzes a reversible conversion of D-ribose from (b) to D-ribulose;

wherein the D-ribulose-5-phosphate and/or D-ribose-5-phosphate is produced by non-oxidative branch of pentose phosphate pathway, and wherein the D-ribulose can be used to produce MEG (or glycolic acid) and optionally, one or more co-product.

[0938] In one embodiment, the enzyme having pentose-5-phosphatase activity is encoded by an amino acid sequence having at least 70% sequence identity, at least 80% sequence identity, or at least 90% sequence identity to an enzyme having pentose-5-phosphatase activity selected from the group consisting of E. coli phoA, E. coli yfbT and E. coli yidA. In further embodiments, the enzyme having pentose-5-phosphatase activity is selected from E. coli phoA, E. coli yfbT and E. coli yidA.

[0939] In some embodiments, the one or more nucleic acid molecules encoding the enzyme having pentose-5-phosphatase activity is phoA, yfbT, yidA or homolog thereof. In another embodiment, the one or more nucleic acid molecules encoding the enzyme having pentose-5-phosphatase activity comprises an amino acid sequence selected from the group consisting of SEQ ID NOs: 160, 168 and 172. In a further embodiment, the one or more nucleic acid molecules encoding the enzyme having pentose-5-phosphatase activity is encoded by a nucleic acid sequence selected from the group consisting of SEQ ID NOs: 159, 167 and 171.

[0940] In another embodiment, the enzyme having D-ribulose-5-phosphatase activity is encoded by an amino acid sequence having at least 70% sequence identity, at least 80% sequence identity, or at least 90% sequence identity to Plasmodium falciparum PF10_0325. In further embodiments, the enzyme having D-ribulose-5-phosphatase activity is Plasmodium falciparum PF10_0325.

[0941] In some embodiments, the one or more nucleic acid molecules encoding the enzyme having D-ribulose-5-phosphatase activity is PF10_0325, or homolog thereof. In another embodiment, the one or more nucleic acid molecules encoding the enzyme having D-ribulose-5-phosphatase activity comprises an amino acid sequence set forth in SEQ ID NO: 174. In a further embodiment, the one or more nucleic acid molecules encoding the enzyme having D-ribulose-5-phosphatase activity comprises a nucleic acid sequence set forth in SEQ ID NO: 173.

[0942] In one embodiment, the enzyme having D-ribose-5-phosphatase activity is encoded by an amino acid sequence having at least 70% sequence identity, at least 80% sequence identity, or at least 90% sequence identity to an enzyme having D-ribose-5-phosphatase activity selected from the group consisting of Arabidopsis thaliana SGPP, Pseudomonas fluorescens PFLU_2693, and E. coli ybiV. In some embodiments, the enzyme having D-ribose-5-phosphatase activity is selected from the group consisting of Arabidopsis thaliana SGPP, Pseudomonas fluorescens PFLU 2693, and E. coli ybiV.

[0943] In some embodiments, the one or more nucleic acid molecules encoding the enzyme having D-ribose-5-phosphatase activity is selected from SGPP, PFLU_2693, ybiV, or homolog thereof. In another embodiment, the one or more nucleic acid molecules encoding the enzyme having D-ribose-5-phosphatase activity comprises an amino acid sequence selected from the group consisting of SEQ ID NOs: 162, 166 and 170. In a further embodiment, the one or more nucleic acid molecules encoding the enzyme having D-ribose-5-phosphatase activity comprises a nucleic acid sequence selected from the group consisting of SEQ ID NOs: 161, 165 and 169.

[0944] In another aspect, a pentose-5-phosphate intermediate produced in embodiment [A] or embodiment [B] (and optionally comprising embodiment [C]) can be connected with any one of the known MEG or glycolic acid production pathways by arabitol phosphate dehydrogenases.

[0945] [F] In one embodiment, the application relates to a recombinant microorganism capable of producing D-ribulose-1-phosphate from D-xylulose-5-phosphate or producing D-xylulose-1-phosphate from D-ribulose-5-phosphate, wherein the recombinant microorganism expresses one or more arabitol phosphate dehydrogenase, wherein the one or more arabitol phosphate dehydrogenase catalyzes one or more of the following from (a) to (d):

[0946] (a) a reversible conversion of D-xylulose-5-phosphate to D-arabitol-1-phosphate;

[0947] (b) a reversible conversion of D-arabitol-1-phosphate from (a) to D-ribulose-1-phosphate;

[0948] (c) a reversible conversion of D-ribulose-5-phosphate to D-arabitol-5-phosphate;

[0949] (d) a reversible conversion of D-arabitol-5-phosphate from (c) to D-xylulose-1-phosphate,

wherein the D-xylulose-5-phosphate and/or D-ribulose-5-phosphate is produced by non-oxidative branch of pentose phosphate pathway, and wherein the D-ribulose-1-phosphate and/or D-xylulose-1-phosphate can be used to produce MEG (or glycolic acid) and optionally, one or more co-product.

[0950] In some embodiments, the enzyme having arabitol phosphate dehydrogenase activity is selected from one or more of an enzyme having D-arabitol 1-phosphate 4-dehydrogenase activity, an enzyme having D-arabitol 5-phosphate 2-dehydrogenase activity, an enzyme having D-arabitol 1-phosphate 2-dehydrogenase activity and an enzyme having D-arabitol 5-phosphate 4-dehydrogenase activity.

[0951] In some embodiments, an enzyme having D-arabitol 1-phosphate 4-dehydrogenase activity is encoded by an amino acid sequence having at least 70% sequence identity, at least 80% sequence identity, or at least 90% sequence identity to APDH from Enterococcus avium. In a preferred embodiment, an enzyme having D-arabitol 1-phosphate 4-dehydrogenase activity is APDH from Enterococcus avium. In some embodiments, the one or more nucleic acid molecules encoding an enzyme having D-arabitol 1-phosphate 4-dehydrogenase activity is set forth in SEQ ID NO: 175. In another embodiment, the one or more nucleic acid molecules encoding an enzyme having D-arabitol 1-phosphate 4-dehydrogenase activity comprise an amino acid sequence set forth in SEQ ID NO: 176.

[0952] In some embodiments, an enzyme having D-arabitol 5-phosphate 2-dehydrogenase activity is encoded by an amino acid sequence having at least 70% sequence identity, at least 80% sequence identity, or at least 90% sequence identity to APDH from Enterococcus avium. In a preferred embodiment, an enzyme having D-arabitol 5-phosphate 2-dehydrogenase activity is APDH from Enterococcus avium. In some embodiments, the one or more nucleic acid molecules encoding an enzyme having D-arabitol 5-phosphate 2-dehydrogenase activity is set forth in SEQ ID NO: 175. In another embodiment, the one or more nucleic acid molecules encoding an enzyme having D-arabitol 5-phosphate 2-dehydrogenase activity comprise an amino acid sequence set forth in SEQ ID NO: 176.

[0953] In some embodiments, an enzyme having D-arabitol 1-phosphate 2-dehydrogenase activity is encoded by an amino acid sequence having at least 70% sequence identity, at least 80% sequence identity, or at least 90% sequence identity to an enzyme having D-arabitol 1-phosphate 2-dehydrogenase activity selected from the group consisting of Candida albicans ARD1, Candida tropicalis ARD1, Scheffersomyces stipitis ARDH, Bacillus subtilis egsA (araM), Aeropyrum pernix egsA, E. coli gpsA and Saccharomyces cerevisiae GPD1. In a preferred embodiment, an enzyme having D-arabitol 1-phosphate 2-dehydrogenase activity is selected from the group consisting of Candida albicans ARD1, Candida tropicalis ARD1, Scheffersomyces stipitis ARDH, Bacillus subtilis egsA (araM), Aeropyrum pernix egsA, E. coli gpsA and Saccharomyces cerevisiae GPD1. In some embodiments, the one or more nucleic acid molecules encoding an enzyme having D-arabitol 1-phosphate 2-dehydrogenase activity is selected from the group consisting of SEQ ID NOs: 177, 179, 181, 189, 191, 193 and 195. In another embodiment, the one or more nucleic acid molecules encoding an enzyme having D-arabitol 1-phosphate 2-dehydrogenase activity comprise an amino acid sequence selected from the group consisting of SEQ ID NOs: 178, 180, 182, 190, 192, 194 and 196.

[0954] In some embodiments, an enzyme having D-arabitol 5-phosphate 4-dehydrogenase activity is encoded by an amino acid sequence having at least 70% sequence identity, at least 80% sequence identity, or at least 90% sequence identity to an enzyme having D-arabitol 5-phosphate 4-dehydrogenase activity selected from the group consisting of Pseudomonas fluorescens mtlD, Klebsiella pneumoniae dalD, Ralstonia solanacearum dalD, Bacillus subtilis egsA (araM), Aeropyrum pernix egsA, E. coli gpsA and Saccharomyces cerevisiae GPD1. In a preferred embodiment, an enzyme having D-arabitol 5-phosphate 4-dehydrogenase activity is selected from the group consisting of Pseudomonas fluorescens mtlD, Klebsiella pneumoniae dalD, Ralstonia solanacearum dalD, Bacillus subtilis egsA (araM), Aeropyrum pernix egsA, E. coli gpsA and Saccharomyces cerevisiae GPD1. In some embodiments, the one or more nucleic acid molecules encoding an enzyme having D-arabitol 5-phosphate 4-dehydrogenase activity is selected from the group consisting of SEQ ID NOs: 183, 185, 187, 189, 191, 193 and 195. In another embodiment, the one or more nucleic acid molecules encoding an enzyme having D-arabitol 5-phosphate 4-dehydrogenase activity comprise an amino acid sequence selected from the group consisting of SEQ ID NOs: 184, 186, 188, 190, 192, 194 and 196.

[0955] In another aspect, a pentose-5-phosphate intermediate produced in embodiment [A] or embodiment [B] (and optionally comprising [C]) can be connected with any one of the known MEG or glycolic acid production pathways by phosphopentomutases.

[0956] [G] In one embodiment, the application relates to a recombinant microorganism capable of producing D-xylulose-1-phosphate from D-xylulose-5-phosphate or producing D-ribulose-1-phosphate from D-ribulose-5-phosphate, wherein the recombinant microorganism expresses one or more phosphopentomutases, wherein the D-xylulose-5-phosphate and/or D-ribulose-5-phosphate is produced by non-oxidative branch of pentose phosphate pathway, and wherein the D-ribulose-1-phosphate and/or D-xylulose-1-phosphate can be used to produce MEG (or glycolic acid) and optionally, one or more co-product.

[0957] In some embodiments, an enzyme having phosphopentomutase activity is encoded by an amino acid sequence having at least 70% sequence identity, at least 80% sequence identity, or at least 90% sequence identity to an enzyme having phosphopentomutase activity selected from the group consisting of E. coli deoB, E. coli pgm, Bacillus subtilis pgcA, Lactococcus lactis pgmB, E. coli ycjU, Pseudomonas aeruginosa algC, and E. coli cpsG. In a preferred embodiment, an enzyme having phosphopentomutase activity is selected from the group consisting of E. coli deoB, E. coli pgm, Bacillus subtilis pgcA, Lactococcus lactis pgmB, E. coli ycjU, Pseudomonas aeruginosa algC, and E. coli cpsG. In some embodiments, the one or more nucleic acid molecules encoding an enzyme having phosphopentomutase activity is selected from the group consisting of SEQ ID NOs: 197, 199, 201, 203, 205, 207 and 209. In another embodiment, the one or more nucleic acid molecules encoding an enzyme having phosphopentomutase activity comprise an amino acid sequence selected from the group consisting of SEQ ID NOs: 198, 200, 202, 204, 206, 208 and 210.

[0958] MEG (or Glycolic Acid), or Optionally MEG (or Glycolic Acid) and Co Product Production Pathways

[0959] In some embodiments, the pentose or pentose-1-phosphate intermediates produced in embodiments [D], [E], [F], and [G] are used in known MEG (or glycolic acid) C2 production pathways, which are coupled to C3 pathways, as described below, to co-produce additional MEG (or glycolic acid) and/or one or more co-products.

[0960] In some embodiments, MEG (or glycolic acid) is produced via a C2 pathway that uses D-xylulose-1-phosphate.

[0961] [H] In one embodiment, the application relates to a recombinant microorganism capable of producing monoethylene glycol (MEG) (or glycolic acid) from one or more hexose feedstock, wherein the recombinant microorganism from embodiment [A] or from embodiment [B] (and optionally comprising embodiment [C]), and comprising additionally one or more of embodiments [D], [F], and [G], further expresses one or more of the following from (a) to (d):

[0962] (a) at least one endogenous or exogenous nucleic acid molecule encoding an enzyme having D-xylulose 1-kinase activity that catalyzes the conversion of D-xylulose from embodiment [D] to D-xylulose-1-phosphate;

[0963] (b) at least one endogenous or exogenous nucleic acid molecule encoding an enzyme having D-xylulose-1-phosphate aldolase activity that catalyzes the conversion of D-xylulose-1-phosphate from (a), from embodiment [F] and/or from embodiment [G], to glycolaldehyde and dihydroxyacetonephosphate (DHAP);

[0964] (c) at least one endogenous or exogenous nucleic acid molecule encoding an enzyme having glycolaldehyde reductase activity or an an enzyme having aldehyde reductase activity that catalyzes the conversion of glycolaldehyde from (b) to MEG;

[0965] (d) at least one endogenous or exogenous nucleic acid molecule encoding an an enzyme having glycolaldehyde dehydrogenase activity that catalyzes the conversion of glycolaldehyde from (b) to glycolic acid;

wherein MEG (or glycolic acid) and DHAP are produced.

[0966] In one embodiment, the enzyme having D-xylulose 1-kinase activity is encoded by one or more nucleic acid molecules obtained from Homo sapiens. In some embodiments, the one or more nucleic acid molecules encoding the enzyme having D-xylulose 1-kinase activity is ketohexokinase C (khk-C), or homolog thereof. In another embodiment, the one or more nucleic acid molecules encoding the enzyme having D-xylulose 1-kinase activity comprises an amino acid sequence set forth in SEQ ID NO: 55. In a further embodiment, the one or more nucleic acid molecules encoding the enzyme having D-xylulose 1-kinase activity is encoded by a nucleic acid sequence selected from the group consisting of SEQ ID NOs: 53 and 54.

[0967] In one embodiment, the enzyme having D-xylulose-1-phosphate aldolase activity is encoded by one or more nucleic acid molecules obtained from Homo sapiens. In another embodiment, the one or more nucleic acid molecules encoding the enzyme having D-xylulose-1-phosphate aldolase activity is aldolase B (aldoB), or homolog thereof. In some embodiments, the one or more nucleic acid molecules encoding the enzyme having D-xylulose-1-phosphate aldolase activity comprises an amino acid sequence set forth in SEQ ID NO: 58. In some embodiments, the one or more nucleic acid molecule encoding the enzyme having D-xylulose-1-phosphate aldolase activity is encoded by a nucleic acid sequence selected from the group consisting of SEQ ID NOs: 56 and 57.

[0968] In some embodiments, MEG (or glycolic acid) is produced via a C2 pathway that uses D-ribulose-1-phosphate.

[0969] [I] In one embodiment, the application relates to a recombinant microorganism capable of producing monoethylene glycol (MEG) (or glycolic acid) from one or more hexose feedstock, wherein the recombinant microorganism from embodiment [A] or from embodiment [B] (and optionally comprising embodiment [C]), and comprising additionally one or more of embodiments [D], [E], [F], and [G], further expresses one or more of the following from (a) to (e):

[0970] (a) at least one endogenous or exogenous nucleic acid molecule encoding an enzyme having D-tagatose 3-epimerase activity that catalyzes the conversion of D-xylulose from embodiment [D] to D-ribulose;

[0971] (b) at least one endogenous or exogenous nucleic acid molecule encoding an enzyme having D-ribulokinase activity that catalyzes the conversion of D-ribulose from (a) and/or from embodiment [E] to D-ribulose-1-phosphate;

[0972] (c) at least one endogenous or exogenous nucleic acid molecule encoding an enzyme having D-ribulose-1-phosphate aldolase activity that catalyzes the conversion of D-ribulose-1-phosphate from (b), from embodiment [F] and/or from embodiment [G] to glycolaldehyde and dihydroxyacetonephosphate (DHAP);

[0973] (d) at least one endogenous or exogenous nucleic acid molecule encoding an enzyme having glycolaldehyde reductase activity that catalyzes the conversion of glycolaldehyde from (c) to MEG;

[0974] (e) at least one endogenous or exogenous nucleic acid molecule encoding an enzyme having glycolaldehyde dehydrogenase activity that catalyzes the conversion of glycolaldehyde from (c) to glycolic acid;

wherein MEG (or glycolic acid) and DHAP are produced.

[0975] In one embodiment, the enzyme having D-tagatose 3-epimerase activity is encoded by one or more nucleic acid molecules obtained from a microorganism selected from the group consisting of Pseudomonas sp., Mesorhizobium sp. and Rhodobacter sp. In some embodiments, the enzyme having D-tagatose 3-epimerase activity is encoded by one or more nucleic acid molecules obtained from a microorganism selected from the group consisting of Pseudomonas cichorii, Pseudomonas sp. ST-24, Mesorhizobium loti and Rhodobacter sphaeroides. In some embodiments, the one or more nucleic acid molecules is dte and/or FJ851309.1, or homolog thereof. In a further embodiment, the enzyme having D-tagatose 3-epimerase activity comprises an amino acid sequence selected from the group consisting of SEQ ID NOs: 3 and 5. In yet a further embodiment, the enzyme having D-tagatose 3-epimerase activity is encoded by a nucleic acid sequence selected from the group consisting of SEQ ID NOs: 1, 2 and 4.

[0976] In one embodiment, the enzyme having D-ribulokinase activity is encoded by one or more nucleic acid molecules obtained from E. coli. In some embodiments, the one or more nucleic acid molecules is fucK, or homolog thereof. In a further embodiment, the enzyme having D-ribulokinase activity comprises an amino acid sequence set forth in SEQ ID NO: 8. In yet a further embodiment, the enzyme having D-ribulokinase activity is encoded by a nucleic acid sequence selected from the group consisting of SEQ ID NOs: 6, 7, and 257.

[0977] In one embodiment, the enzyme having D-ribulose-1-phosphate aldolase activity is encoded by one or more nucleic acid molecules obtained from E. coli. In some embodiments, the one or more nucleic acid molecules is fucA, or homolog thereof. In a further embodiment, the enzyme having D-ribulose-1-phosphate aldolase activity comprises an amino acid sequence set forth in SEQ ID NO: 11. In yet a further embodiment, the enzyme having D-ribulose-1-phosphate aldolase activity is encoded by a nucleic acid sequence selected from the group consisting of SEQ ID NOs: 9 and 10.

[0978] In some embodiments, MEG (or glycolic acid) is produced via a C2 pathway that uses D-xylonate.

[0979] [J] In one embodiment, the application relates to a recombinant microorganism capable of producing monoethylene glycol (MEG) (or glycolic acid) from one or more hexose feedstock, wherein the recombinant microorganism from embodiment [A] or from embodiment [B] (and optionally comprising embodiment [C]), and comprising additionally embodiment [D], further expresses one or more of the following from (a) to (d):

[0980] (a) at least one endogenous or exogenous nucleic acid molecule encoding an enzyme having xylose isomerase activity that catalyzes the conversion of D-xylulose from embodiment [D] to D-xylose;

[0981] (b) at least one endogenous or exogenous nucleic acid molecule encoding an enzyme having xylose dehydrogenase activity that catalyzes the conversion of D-xylose from (a) to D-xylonolactone;

[0982] (c) at least one endogenous or exogenous nucleic acid molecule encoding an enzyme having xylonolactonase activity that catalyzes the conversion of D-xylonolactone from (b) to D-xylonate;

[0983] (d) at least one endogenous or exogenous nucleic acid molecule encoding an enzyme having xylose dehydrogenase activity that catalyzes the conversion of D-xylose from (a) to D-xylonate;

wherein the recombinant microorganism further expresses one or more of the following from (e) to (h):

[0984] (e) at least one endogenous or exogenous nucleic acid molecule encoding an enzyme having xylonate dehydratase activity that catalyzes the conversion of D-xylonate from (c) or (d) to 2-keto-3-deoxy-xylonate;

[0985] (f) at least one endogenous or exogenous nucleic acid molecule encoding an enzyme having 2-keto-3-deoxy-D-pentonate aldolase activity that catalyzes the conversion of 2-keto-3-deoxy-xylonate from (e) to glycolaldehyde and pyruvate;

[0986] (g) at least one endogenous or exogenous nucleic acid molecule encoding an enzyme having glycolaldehyde reductase activity that catalyzes the conversion of glycolaldehyde from (f) to MEG;
[0987] (h) at least one endogenous or exogenous nucleic acid molecule encoding an enzyme having glycolaldehyde dehydrogenase activity that catalyzes the conversion of glycolaldehyde from (f) to glycolic acid;
   wherein MEG (or glycolic acid) and pyruvate are produced.

[0988] In some embodiments, the recombinant microorganism comprises an endogenous or exogenous enzyme having xylose isomerase activity that catalyzes the conversion of D-xylulose to D-xylose. In one embodiment, the enzyme having xylose isomerase activity is exogenous. In another embodiment, the enzyme having xylose isomerase activity is encoded by one or more nucleic acid molecules obtained from Pyromyces sp. In a further embodiment, the enzyme having xylose isomerase activity is encoded by one or more nucleic acid molecules obtained from E. coli. In another embodiment, the one or more nucleic acid molecules encoding the enzyme having xylose isomerase activity is xylA, or homolog thereof. In yet another embodiment, the one or more nucleic acid molecules encoding the enzyme having xylose isomerase activity comprises an amino acid sequence selected from SEQ ID NOs: 95 and 144. In a further embodiment, the one or more nucleic acid molecules encoding the enzyme having xylose isomerase activity comprises a nucleic acid sequence selected from the group consisting of SEQ ID NOs: 93, 94 and 143.

[0989] In one embodiment, the enzyme having xylose dehydrogenase activity is encoded by one or more nucleic acid molecules obtained from a microorganism selected from the group consisting of Caulobacter sp., Haloarcula sp., Haloferax sp., Halorubrum sp. and Trichoderma sp. In another embodiment, the enzyme having xylose dehydrogenase activity is encoded by one or more nucleic acid molecules obtained from a microorganism selected from the group consisting of Caulobacter crescentus, Haloarcula marismortui, Haloferax volcanii, Halorubrum lacusprofundi and Trichoderma reesei. In some embodiments, the one or more nucleic acid molecules encoding the enzyme having xylose dehydrogenase activity is selected from xylB, xdh1 (HVO_B0028) and/or xyd1, or homolog thereof. In a further embodiment, the one or more nucleic acid molecules encoding the enzyme having xylose dehydrogenase activity comprises an amino acid sequence selected from the group consisting of SEQ ID NOs: 61, 63 and 65. In yet another embodiment, the one or more nucleic acid molecules encoding the enzyme having xylose dehydrogenase activity comprises a nucleic acid sequence selected from the group consisting of SEQ ID NOs: 59, 60, 62 and 64.

[0990] In one embodiment, the enzyme having xylonolactonase activity is encoded by one or more nucleic acid molecules obtained from a microorganism selected from Caulobacter sp. and Haloferax sp. In another embodiment, the enzyme having xylonolactonase activity is encoded by one or more nucleic acid molecules obtained from a microorganism selected from the group consisting of Caulobacter crescentus, Haloferax volcanii and Haloferax gibbonsii. In some embodiments, the one or more nucleic acid molecules encoding the enzyme having xylonolactonase activity is xylC, or homolog thereof. In a further embodiment, the one or more nucleic acid molecules encoding the enzyme having xylonolactonase activity comprises an amino acid sequence set forth in SEQ ID NO: 67. In yet another embodiment, the one or more nucleic acid molecules encoding the enzyme having xylonolactonase activity comprises a nucleic acid sequence set forth in SEQ ID NO: 66.

[0991] In one embodiment, the enzyme having xylonate dehydratase activity is encoded by one or more nucleic acid molecules obtained from a microorganism selected from the group consisting of Caulobacter sp., Sulfolobus sp. and E. coli. In another embodiment, the enzyme having xylonate dehydratase activity is encoded by one or more nucleic acid molecules obtained from a microorganism selected from the group consisting of Caulobacter crescentus, Sulfolobus solfataricus and E. coli. In some embodiments, the one or more nucleic acid molecules encoding the enzyme having xylonate dehydratase activity is selected from xylD, yjhG and/or yagF, or homolog thereof. In a further embodiment, the one or more nucleic acid molecules encoding the enzyme having xylonate dehydratase activity comprises an amino acid sequence selected from the group consisting of SEQ ID NOs: 69, 72 and 75. In yet another embodiment, the one or more nucleic acid molecules encoding the enzyme having xylonate dehydratase activity comprises a nucleic acid sequence selected from the group consisting of SEQ ID NOs: 68, 70, 71, 73 and 74.

[0992] In one embodiment, the enzyme having 2-keto-3-deoxy-D-pentonate aldolase activity is encoded by one or more nucleic acid molecules obtained from a microorganism selected from Pseudomonas sp. and E. coli. In another embodiment, the enzyme having 2-keto-3-deoxy-D-pentonate aldolase activity is encoded by one or more nucleic acid molecules obtained from E. coli. In some embodiments, the one or more nucleic acid molecules encoding the enzyme having 2-keto-3-deoxy-D-pentonate aldolase activity is selected from yjhH and/or yagE, or homolog thereof. In a further embodiment, the one or more nucleic acid molecules encoding the enzyme having 2-keto-3-deoxy-D-pentonate aldolase activity comprises an amino acid sequence selected from the group consisting of SEQ ID NOs: 78 and 81. In yet another embodiment, the one or more nucleic acid molecules encoding the enzyme having 2-keto-3-deoxy-D-pentonate aldolase activity comprises a nucleic acid sequence selected from the group consisting of SEQ ID NOs: 76, 77, 79 and 80.

[0993] Co-Production of MEG (or Glycolic Acid) Via a C2 Pathway and MEG (or Glycolic Acid) Via a C3 Pathway

[0994] In one aspect, MEG (or glycolic acid) is produced from one or more hexose feedstock by the lossless transformation of the one or more hexose feedstock to one or more pentose-5-phosphate intermediate, followed by a conversion of the one or more pentose-5-phosphate intermediate to one or more pentose and/or pentose-1-phosphate intermediate, followed by a conversion of the one or more pentose and/or pentose-1-phosphate intermediate to MEG (or glycolic acid) and DHAP or pyruvate via a C2 pathway, and a conversion of DHAP or pyruvate to MEG via a C3 pathway.

[0995] In some embodiments, the application relates to a recombinant microorganism capable of producing MEG (or glycolic acid) from one or more hexose feedstock, wherein the recombinant microorganism from embodiment [A] or from embodiment [B] (and optionally comprising embodiment [C]), and having additionally one or more of embodiments [D], [E], [F], and [G], further comprises one or more C2 biosynthesis pathway selected from embodiments [H], [I] and [J] for production of MEG (or glycolic acid) and one or more C3 biosynthesis pathway for the production of MEG (or glycolic acid). The C3 biosynthesis pathways for the production of MEG are, for example, as described in WO 2010/076324 (Metabolic Explorer), herein incorporated by reference in its entirety.

[0996] In some embodiments, the C3 biosynthesis pathway for the production of MEG comprises three enzymatic reactions starting with transformation of the 3-phosphohydroxypyruvate precursor (precursor for serine). First, a phosphatase activity allows conversion of phosphohydroxypyruvate into hydroxypyruvate. Hydroxypyruvate is then transformed into glycolaldehyde with a 2-keto acid decarboxylase activity. Finally, a hydroxy aldehyde reductase activity allows the conversion of glycolaldehyde into ethylene glycol. Another pathway for the production of ethylene glycol starts from L-serine as precursor. First a transaminase or an amino acid oxidase activity allows conversion of serine into hydroxypyruvate. The next two steps to convert hydroxypyruvate into glycolaldehyde and then to MEG are similar to the first pathway described above.

[0997] In a preferred embodiment, the disclosure provides for a recombinant microorganism comprising one or more C3 biosynthesis pathways for production of MEG. In some embodiments, the recombinant microorganism, particularly a bacterium, contains at least one gene encoding a polypeptide with 2-keto acid decarboxylase activity and one gene encoding a polypeptide with hydroxy aldehyde reductase activity. These genes can be exogenous or endogenous, and can be expressed chromosomally or extrachromosomally.

[0998] In a further embodiment of the disclosure, the recombinant microorganism, particularly a bacterium, comprises modifications in which the availability of the intermediate 3-phosphoglycerate is increased. Preferably, the increase is achieved by attenuating the level of expression of genes encoding phosphoglycerate mutases, in particular one or both genes gpmA and pgmM. This can be done by replacing the wild-type promoter of these genes by a weaker promoter, or by the use of an element destabilizing the corresponding messenger RNA or the protein. If needed, complete attenuation of the genes can also be achieved by the deletion of the corresponding DNA sequences.

[0999] In another embodiment, the recombinant microorganism, particularly a bacterium, comprises modifications in which flux into the serine biosynthesis pathway is stimulated. This can be achieved by increasing the level of expression of 3-phosphoglycerate dehydrogenase and/or phosphoserine aminotransferase, encoded by the serA and serC genes, respectively. Increasing the level of expression of the 3-phosphoglycerate dehydrogenase and/or phosphoserine aminotransferase can be accomplished by introducing artificial promoters that drive the expression of the serA and/or serC genes, by increasing the number of copies in the cell or by introducing mutations into the serA and/or serC genes that increase the activity of the corresponding proteins. The expression of the serA gene can also be increased by replacing the wild type lrp gene (encoding the leucine-responsive regulatory protein) by an lrp mutated allele (such as the lrp-1 allele corresponding to a GLU 114 ASP substitution in the lrp protein) leading to the constitutive activation of the transcription of the serA gene.

[1000] In a particular embodiment of the disclosure mutations can be introduced into the serA gene that reduce the sensitivity of the SerA protein to the feed-back inhibitor serine (feed-back desensitized alleles) and thus permit an increased activity in the presence of serine. Examples of desensitized alleles, i.e. feed-back insensitive alleles, have been described in EP 0 931 833 (Ajinomoto) or EP 0 620 853 (Wacker).

[1001] In another embodiment, the recombinant microorganism, particularly a bacterium, comprises modifications in which flux into the hydroxypyruvate biosynthesis pathway is stimulated. This result can be achieved by increasing the level of expression of serine transaminase or serine oxidase (for the pathway starting from serine as precursor), or by increasing the expression of 3-phosphohydroxypyruvate phosphatase. Increasing the level of expression of serine oxidase can be accomplished by introducing and overexpressing the gene coding for L-amino acid oxidase from R. opacus, or by introducing mutations into the gene that increase the activity of the corresponding protein. An increase in the expression of serine transaminase can be accomplished by introducing artificial promoters that drive the expression of the serC gene of E. coli, by increasing the number of copies in the cell or by introducing mutations into the serC gene that increase the activity of the corresponding protein. An increase of the expression of 3-phosphohydroxypyruvate phosphatase can be accomplished by introducing artificial promoters that drive the expression of the yeaB gene or serB gene of E. coli, by increasing the number of copies in the cell or by introducing mutations into the yeaB gene or the serB gene that increase the activity of the corresponding proteins. An increase of the expression of 3-phosphohydroxypyruvate phosphatase can also be accomplished by introducing and overexpressing the gene GPP2 from S. cerevisiae, or by introducing mutations into the GPP2 gene that increase the activity of the corresponding protein.

[1002] In a further embodiment of the disclosure, the recombinant microorganism, particularly a bacterium, comprises modifications to present an attenuated level of glycolaldehyde conversion to other compounds than ethylene glycol This may be achieved by attenuating the level of glycolaldehyde consuming enzymes like hydroxythreonine aldolase (encoded by UaE) or glycolaldehyde dehydrogenase (encoded by aldA, aldB). Attenuation of these genes can be done by replacing the natural promoter by a lower strength promoter or by elements destabilizing the corresponding messenger RNA or the protein. If needed, complete attenuation of the gene can also be achieved by a deletion of the corresponding DNA sequence.

[1003] In a further embodiment of the disclosure, the efficiency of sugar import is increased, either by using a sugar import system not relying on phosphoenolpyruvate (PEP) as phosphordonor like galP that is known to transport glucose, or by providing more phosphoenolpyruvate (PEP) to the sugar-phosphotransferase system. Various means exist that may be used to increase the availability of PEP in a microorganism. In particular, this can be accomplished by attenuating the reaction PEP→pyruvate. Preferentially, at least one gene selected among pykA and pykF, encoding pyruvate kinase, is attenuated in said strain in order to obtain this result. Another way to increase the availability of PEP is to favour the reaction pyruvate→PEP. This can be accomplished by increasing the activity of phosphoenolpyruvate synthase which catalyzes the above reaction. This enzyme is encoded by the ppsA gene. Therefore, in the microorganism, the expression of the ppsA gene is preferentially increased. Both modifications can be present in the microorganism simultaneously.

[1004] In a further embodiment of the disclosure, the recombinant microorganism, particularly a bacterium, comprises modifications to present an attenuated level of serine conversion to other compounds than ethylene glycol. This result may be achieved by attenuating the level of serine consuming enzymes like serine deaminases (encoded by sdaA, sdaB and/or tdcG), serine transacetylase (encoded by cysE), tryptophan synthase (encoded by trpAB) or serine hydroxymethyltransferase (encoded by glyA). These genes can be attenuated by replacing the natural promoter by a lower strength promoter or by elements destabilizing the corresponding messenger RNA or the protein. If needed, complete attenuation of the gene can also be achieved by a deletion of the corresponding DNA sequence.

[1005] In a further embodiment of the disclosure, the recombinant microorganism, particularly a bacterium, comprises modifications to present an attenuated level of hydroxypyruvate conversion to other compounds than glycolaldehyde. This result may be achieved by attenuating the level of hydroxypyruvate consuming enzymes like hydroxypyruvate reductase (encoded by ghrA) or hydroxypyruvate isomerase (encoded by hyi). These genes can be attenuated by replacing the natural promoter by a lower strength promoter or by elements destabilizing the corresponding messenger RNA or the protein. If needed, complete attenuation of the gene can also be achieved by a deletion of the corresponding DNA sequence.

[1006] In some embodiments, the application relates to a recombinant microorganism capable of producing MEG (or glycolic acid) from one or more hexose feedstock, wherein the recombinant microorganism from embodiment [A] or from embodiment [B] (and optionally comprising embodiment [C]), and having additionally one or more of embodiments [D], [E], [F], and [G], further comprises one or more C3 biosynthesis pathway for the production of MEG (or glycolic acid). The C3 biosynthesis pathways for the production of MEG are, for example, as described in as described in WO 2011/130378 (Genomatica), herein incorporated by reference in its entirety.

[1007] In some embodiments, the disclosure provides a recombinant microorganism comprising an ethylene glycol pathway having at least one exogenous nucleic acid encoding an ethylene glycol pathway enzyme expressed in a sufficient amount to produce ethylene glycol, the ethylene glycol pathway including a serine aminotransferase, a serine oxidoreductase (deaminating), a hydroxypyruvate decarboxylase, a glycolaldehyde reductase, a serine decarboxylase, an ethanolamine aminotransferase, an ethanolamine oxidoreductase (deaminating), a hydroxypyruvate reductase or a glycerate decarboxylase.

[1008] In some embodiments, the recombinant microorganism comprises an ethylene glycol pathway having at least one exogenous nucleic acid encoding ethylene glycol pathway enzymes expressed in a sufficient amount to produce ethylene glycol, the ethylene glycol pathway including a serine aminotransferase or a serine oxidoreductase (deaminating); a hydroxypyruvate decarboxylase, and a glycolaldehyde reductase.

[1009] In some embodiments, the recombinant microorganism comprises an ethylene glycol pathway having at least one exogenous nucleic acid encoding ethylene glycol pathway enzymes expressed in a sufficient amount to produce ethylene glycol, the ethylene glycol pathway including a serine aminotransferase or a serine oxidoreductase (deaminating); a hydroxypyruvate reductase, and a glycerate decarboxylase.

[1010] In some embodiments, the recombinant microorganism comprises an ethylene glycol pathway having at least one exogenous nucleic acid encoding ethylene glycol pathway enzymes expressed in a sufficient amount to produce ethylene glycol, the ethylene glycol pathway including a serine decarboxylase; an ethanolamine aminotransferase or an ethanolamine oxidoreductase (deaminating), and a glycolaldehyde reductase.

[1011] In some embodiments, the disclosure provides a recombinant microorganism comprising an ethylene glycol pathway having at least one exogenous nucleic acid encoding an ethylene glycol pathway enzyme expressed in a sufficient amount to produce ethylene glycol, the ethylene glycol pathway including a hydroxypyruvate decarboxylase, glycolaldehyde reductase, a hydroxypyruvate reductase, a glycerate decarboxylase, a 3-phosphoglycerate phosphatase, and a glycerate kinase.

[1012] In some embodiments, the recombinant microorganism comprises an ethylene glycol pathway having at least one exogenous nucleic acid encoding ethylene glycol pathway enzymes expressed in a sufficient amount to produce ethylene glycol, the ethylene glycol pathway including a hydroxypyruvate reductase; a hydroxypyruvate decarboxylase, and a glycolaldehyde reductase.

[1013] In some embodiments, the recombinant microorganism comprises an ethylene glycol pathway having at least one exogenous nucleic acid encoding ethylene glycol pathway enzymes expressed in a sufficient amount to produce ethylene glycol, the ethylene glycol pathway including a 3-phosphoglycerate phosphatase or a glycerate kinase; a hydroxypyruvate reductase; a hydroxypyruvate decarboxylase, and a glycolaldehyde reductase.

[1014] In some embodiments, the recombinant microorganism comprises an ethylene glycol pathway having at least one exogenous nucleic acid encoding an ethylene glycol pathway enzyme expressed in a sufficient amount to produce ethylene glycol, the ethylene glycol pathway including a glycerate decarboxylase.

[1015] In some embodiments, the recombinant microorganism comprises an ethylene glycol pathway having at least one exogenous nucleic acid encoding ethylene glycol pathway enzymes expressed in a sufficient amount to produce ethylene glycol, the ethylene glycol pathway including a 3-phosphoglycerate phosphatase or a glycerate kinase and a glycerate decarboxylase.

[1016] In some embodiments, the disclosure provides a recombinant microorganism comprising an ethylene glycol pathway, wherein the recombinant microorganism comprises at least one exogenous nucleic acid encoding an enzyme or protein that converts a substrate to a product selected from the group consisting of serine to hydroxypyruvate, hydroxypyruvate to glycolaldehyde, glycolaldehyde to ethylene glycol, serine to ethanolamine, ethanolamine to glycolaldehyde, 3-phosphoglycerate to glycerate, glycerate to hydroxypyruvate, hydroxypyruvate to glycerate, and glycerate to ethylene glycol. One skilled in the art will understand that these are merely exemplary and that any of the substrate-product pairs disclosed herein suitable to produce a desired product and for which an appropriate activity is available for the conversion of the substrate to the product can be readily determined by one skilled in the art based on the teachings herein. Thus, the disclosure provides a recombinant microorganism containing at least one exogenous nucleic acid encoding an enzyme or protein, where the enzyme or protein converts the substrates and products of an ethylene glycol pathway.

[1017] While generally described herein as a recombinant microorganism that contains an ethylene glycol pathway, it is understood that the disclosure additionally provides a recombinant microorganism comprising at least one exogenous nucleic acid encoding an ethylene glycol pathway enzyme expressed in a sufficient amount to produce an intermediate of an ethylene glycol pathway. Therefore, in addition to a recombinant microorganism containing an ethylene glycol pathway that produces ethylene glycol, the disclosure additionally provides a recombinant microorganism comprising at least one exogenous nucleic acid encoding an ethylene glycol pathway enzyme, where the microbial organism produces an ethylene glycol pathway intermediate, for example, hydroxypyruvate, ethanolamine, glycolaldehyde, or glycerate.

[1018] In some embodiments, a serine aminotransferase or serine oxidoreductase (deaminating) catalyzes the conversion of serine to hydroxypyruvate. In some embodiments, a hydroxypyruvate decarboxylase catalyzes the conversion of hydroxypyruvate to glycolaldehyde. In some embodiments, a glycolaldehyde reductase catalyzes the conversion of glycolaldehyde to ethylene glycol. In some embodiments, a serine decarboxylase catalyzes the conversion of serine to ethanolamine. In some embodiments, an ethanolamine aminotransferase or ethanolamine oxidoreductase (deaminating) catalyzes the conversion of ethanolamine to glycolaldehyde. In some embodiments, a hydroxypyruvate reductase catalyzes the conversion of glycerate to hydroxypyruvate. In some embodiments, a glycerate decarboxylase catalyzes the conversion of glycerate to ethylene glycol. In some embodiments, a 3-phosphoglycerate phosphatase or glycerate kinase catalyzes the conversion of 3-phosphoglycerate to glycerate.

[1019] In some embodiments, MEG (or glycolic acid) is produced from the lossless transformation of one or more hexose feedstock to one or more pentose-5-phosphate intermediate, followed by a conversion of the one or more pentose-5-phosphate intermediate to one or more pentose and/or pentose-1-phosphate intermediate, followed by a conversion of the one or more pentose and/or pentose-1-phosphate intermediate to MEG (or glycolic acid) and DHAP or pyruvate via a C2 pathway, and a conversion of DHAP or pyruvate to MEG (or glycolic acid) via a C3 pathway.

[1020] In some embodiments, the C2 pathway for production of MEG (or glycolic acid) comprises embodiment [H] and the C3 pathway for production of MEG (or glycolic acid) comprises embodiment [K]. In other embodiments, the C2 pathway for production of MEG (or glycolic acid) comprises embodiment [H] and the C3 pathway for production of MEG (or glycolic acid) comprises embodiment [L]. In some embodiments, the C2 pathway for production of MEG (or glycolic acid) comprises embodiment [I] and the C3 pathway for production of MEG (or glycolic acid) comprises embodiment [K]. In further embodiments, the C2 pathway for production of MEG (or glycolic acid) comprises embodiment [I] and the C3 pathway for production of MEG (or glycolic acid) comprises embodiment [L]. In some embodiments, the C2 pathway for production of MEG (or glycolic acid) comprises embodiment [J] and the C3 pathway for production of MEG (or glycolic acid) comprises embodiment [K]. In some embodiments, the C2 pathway for production of MEG (or glycolic acid) comprises embodiment [J] and the C3 pathway for production of MEG (or glycolic acid) comprises embodiment [L].

[1021] [K] In one embodiment, the application relates to a recombinant microorganism capable of producing monoethylene glycol (MEG) (or glycolic acid) from one or more hexose feedstock, wherein the recombinant microorganism from embodiment [A] or from embodiment [B] (and optionally comprising embodiment [C]), and comprising additionally one or more of embodiments [D], [E], [F], and [G], further comprising one or more of embodiments [H], [I], and [J], further expresses one or more of the following from (a) to (h):

[1022] (a) at least one endogenous or exogenous nucleic acid molecule encoding an enzyme having 3-phosphoglycerate dehydrogenase activity that catalyzes the conversion of 3-phosphoglycerate to 3-phosphohydroxypyruvate;

[1023] (b) at least one endogenous or exogenous nucleic acid molecule encoding an enzyme having phosphoserine aminotransferase activity that catalyzes the conversion of 3-phosphohydroxypyruvate from (a) to phospho-L-serine;

[1024] (c) at least one endogenous or exogenous nucleic acid molecule encoding an enzyme having 3-phosphohydroxypyruvate phosphatase activity that catalyzes the conversion of 3-phosphohydroxypyruvate from (a) to hydroxypyruvate;

[1025] (d) at least one endogenous or exogenous nucleic acid molecule encoding an enzyme having phosphoserine phosphatase activity that catalyzes the conversion of phospho-L-serine from (b) to L-serine;

[1026] (e) at least one endogenous or exogenous nucleic acid molecule encoding an enzyme having L-serine transaminase or serine oxidase activity that catalyzes the conversion of L-serine from (d) to hydroxypyruvate;

[1027] (f) at least one endogenous or exogenous nucleic acid molecule encoding an enzyme having hydroxypyruvate decarboxylase activity that catalyzes the conversion of hydroxypyruvate from (c) or (e) to glycolaldehyde;

[1028] (g) at least one endogenous or exogenous nucleic acid molecule encoding an enzyme having glycolaldehyde reductase activity that catalyzes the conversion of glycolaldehyde from (f) to MEG;
[1029] (h) at least one endogenous or exogenous nucleic acid molecule encoding an enzyme having glycolaldehyde dehydrogenase activity that catalyzes the conversion of glycolaldehyde from (f) to glycolic acid;
   wherein the produced intermediate DHAP from embodiments [H] and/or [I] and/or pyruvate from embodiment [J] is converted to 3-phosphoglycerate through endogenous glycolysis or gluconeogenesis, respectively, in the microorganism, and wherein MEG (or glycolic acid) is produced.

[1030] [L] In one embodiment, the application relates to a recombinant microorganism capable of producing monoethylene glycol (MEG) (or glycolic acid) from one or more hexose feedstock, wherein the recombinant microorganism from embodiment [A] or from embodiment [B] (and optionally comprising embodiment [C]), and comprising additionally one or more of embodiments [D], [E], [F], and [G], further comprising one or more of embodiments [H], [I], and [J], further expresses one or more of the following from (a) to (j):

[1031] (a) at least one endogenous or exogenous nucleic acid molecule encoding an enzyme having 2-phosphoglycerate phosphatase activity and/or an enzyme having glycerate-2-kinase activity that catalyzes the conversion of 2-phosphoglycerate to glycerate;

[1032] (b) at least one endogenous or exogenous nucleic acid molecule encoding an enzyme having 3-phosphoglycerate phosphatase activity or an enzyme having glycerate-3-kinase activity that catalyzes the conversion of 3-phosphoglycerate to glycerate;

[1033] (c) at least one endogenous or exogenous nucleic acid molecule encoding an enzyme having hydroxypyruvate reductase activity that catalyzes the conversion of glycerate from (a) and/or (b) to hydroxypyruvate;

[1034] (d) at least one endogenous or exogenous nucleic acid molecule encoding an enzyme having serine aminotransferase activity or an enzyme having serine oxidoreductase (deaminating) activity that catalyzes the conversion of L-serine to hydroxypyruvate;

[1035] (e) at least one endogenous or exogenous nucleic acid molecule encoding an enzyme having L-serine decarboxylase activity that catalyzes the conversion of L-serine to ethanolamine;

[1036] (f) at least one endogenous or exogenous nucleic acid molecule encoding an enzyme having hydroxypyruvate decarboxylase activity that catalyzes the conversion of hydroxypyruvate from (c) and/or (d) to glycolaldehyde;

[1037] (g) at least one endogenous or exogenous nucleic acid molecule encoding an enzyme having ethanolamine aminotransferase or ethanolamine oxidoreductase (deaminating) activity that catalyzes the conversion of ethanolamine from (e) to glycolaldehyde;

[1038] (h) at least one endogenous or exogenous nucleic acid molecule encoding an enzyme having glycerate decarboxylase activity that catalyzes the conversion of glycerate from (a) and/or (b) to MEG;

[1039] (i) at least one endogenous or exogenous nucleic acid molecule encoding an enzyme having glycolaldehyde reductase activity that catalyzes the conversion of glycolaldehyde from (f) and/or (g) to MEG;

[1040] (j) at least one endogenous or exogenous nucleic acid molecule encoding an enzyme having glycolaldehyde dehydrogenase activity that catalyzes the conversion of glycolaldehyde from (f) and/or (g) to glycolic acid;

wherein the produced intermediate DHAP from embodiments [H] and/or [I] and/or pyruvate from embodiment [J] is converted to 3-phosphoglycerate and/or 2-phosphoglycerate through endogenous glycolysis or gluconeogenesis in the microorganism, and wherein MEG (or glycolic acid) is produced.

[1041] In some embodiments, a 2-keto acid decarboxylase, a hydroxypyruvate decarboxylase or a 2-oxoglutarate decarboxylase converts hydroxypyruvate to glycolaldehyde. In some embodiments, the enzyme that converts hydroxypyruvate to glycolaldehyde is encoded by an amino acid sequence having at least 70% sequence identity, having at least 80% sequence identity, or having at least 90% sequence identity to Kivd, dxs, or SucA. In some embodiments, the 2-keto acid decarboxylase is Kivd from Lactococcus lactis. In yet another embodiment, the one or more nucleic acid molecules encoding the 2-keto acid decarboxylase comprises an amino acid sequence set forth in SEQ ID NO: 224. In a further embodiment, the one or more nucleic acid molecules encoding the 2-keto acid decarboxylase comprises by a nucleic acid sequence set forth in SEQ ID NO: 223. In some embodiments, the 2-oxoglutarate decarboxylase is SucA from E. coli. In yet another embodiment, the one or more nucleic acid molecules encoding the 2-oxoglutarate decarboxylase comprises an amino acid sequence set forth in SEQ ID NO: 226. In a further embodiment, the one or more nucleic acid molecules encoding the 2-oxoglutarate decarboxylase comprises a nucleic acid sequence set forth in SEQ ID NO: 225.

[1042] In some embodiments, the hydroxy aldehyde reductase can be a glycolaldehyde reductase. In some embodiments, the enzyme having glycolaldehyde reductase activity is encoded by an amino acid sequence having at least 70% sequence identity, having at least 80% sequence identity, or having at least 90% sequence identity to yqhD or FucO. In some embodiments, the enzyme having glycolaldehyde reductase activity is encoded by one or more nucleic acid molecules obtained from a microorganism selected from E. coli and S. cerevisiae. In another embodiment, the one or more nucleic acid molecules is selected from gldA, GRE2, GRE3, yqhD, ydjG, fucO, yafB (dkgB), and/or yqhE (dkgA), or homolog thereof. In another embodiment, the one or more nucleic acid molecules is yqhD. In some embodiments, the yqhD comprises a G149E mutation. In a further embodiment, the enzyme having glycolaldehyde reductase activity comprises an amino acid sequence selected from the group consisting of SEQ ID NOs: 13, 15, 17, 20, 23, 25, 28, 30 and 32. In yet a further embodiment, the enzyme having glycolaldehyde reductase activity is encoded by a nucleic acid sequence selected from the group consisting of SEQ ID NOs: 12, 14, 16, 18, 19, 21, 22, 24, 26, 27, 29 and 31.

[1043] In some embodiments, the 3-phosphoglycerate dehydrogenase can be a 3-phospho-hydroxypyruvate reductase or a 2-oxoglutarate reductase. In some embodiments, the enzyme having 3-phospho-hydroxypyruvate reductase activity is encoded by an amino acid sequence having at least 70% sequence identity, having at least 80% sequence identity, or having at least 90% sequence identity to serA. In some embodiments, the enzyme having 3-phospho-hydroxypyruvate reductase activity is serA from E. coli. In yet another embodiment, the one or more nucleic acid molecules encoding the enzyme having 3-phospho-hydroxypyruvate reductase activity comprises an amino acid sequence set forth in SEQ ID NO: 228. In a further embodiment, the one or more nucleic acid molecules encoding the enzyme having 3-phospho-hydroxypyruvate reductase activity comprises a nucleic acid sequence set forth in SEQ ID NO: 227.

[1044] In some embodiments, the phosphoserine aminotransferase can be an L-serine transaminase, a serine aminotransferase or a serine-pyruvate aminotransferase. In some embodiments, the enzyme having phosphoserine aminotransferase activity is encoded by an amino acid sequence having at least 70% sequence identity, having at least 80% sequence identity, or having at least 90% sequence identity to serC. In some embodiments, the enzyme having phosphoserine aminotransferase activity is serC from E. coli. In yet another embodiment, the one or more nucleic acid molecules encoding the enzyme having phosphoserine aminotransferase activity comprises an amino acid sequence set forth in SEQ ID NO: 230. In a further embodiment, the one or more nucleic acid molecules encoding the enzyme having phosphoserine aminotransferase activity comprises a nucleic acid sequence set forth in SEQ ID NO: 229.

[1045] In some embodiments, the enzyme having serine-pyruvate aminotransferase activity is AGXT1 from Homo sapiens. In yet another embodiment, the one or more nucleic acid molecules encoding the enzyme having serine-pyruvate aminotransferase activity comprises an amino acid sequence set forth in SEQ ID NO: 244. In a further embodiment, the one or more nucleic acid molecules encoding the enzyme having serine-pyruvate aminotransferase activity comprises a nucleic acid sequence set forth in SEQ ID NO: 243.

[1046] In some embodiments, the enzyme having 3-phospho-hydroxypyruvate phosphatase activity is encoded by an amino acid sequence having at least 70% sequence identity, having at least 80% sequence identity, or having at least 90% sequence identity to yeaB (nudL). In some embodiments, the enzyme having 3-phospho-hydroxypyruvate phosphatase activity is yeaB (nudL) from E. coli. In yet another embodiment, the one or more nucleic acid molecules encoding the enzyme having 3-phospho-hydroxypyruvate phosphatase activity comprises an amino acid sequence set forth in SEQ ID NO: 232. In a further embodiment, the one or more nucleic acid molecules encoding the enzyme having 3-phospho-hydroxypyruvate phosphatase activity comprises a nucleic acid sequence set forth in SEQ ID NO: 231.

[1047] In some embodiments, the enzyme having phosphoserine phosphatase activity is encoded by an amino acid sequence having at least 70% sequence identity, having at least 80% sequence identity, or having at least 90% sequence identity to serB. In some embodiments, the enzyme having phosphoserine phosphatase activity is serB from E. coli. In yet another embodiment, the one or more nucleic acid molecules encoding the enzyme having phosphoserine phosphatase activity comprises an amino acid sequence set forth in SEQ ID NO: 234. In a further embodiment, the one or more nucleic acid molecules encoding the enzyme having phosphoserine phosphatase activity comprises a nucleic acid sequence set forth in SEQ ID NO: 233.

[1048] In some embodiments, an enzyme having 2-phosphoglycerate phosphatase activity or an enzyme having glycerate-2-kinase activity converts 2-phosphoglycerate to glycerate. In some embodiments, the enzyme that converts 2-phosphoglycerate to glycerate is encoded by an amino acid sequence having at least 70% sequence identity, having at least 80% sequence identity, or having at least 90% sequence identity to phoA, glxK or garK. In some embodiments, the enzyme having 2-phosphoglycerate phosphatase activity is phoA from E. coli. In yet another embodiment, the one or more nucleic acid molecules encoding the enzyme having 2-phosphoglycerate phosphatase activity comprises an amino acid sequence set forth in SEQ ID NO: 246. In a further embodiment, the one or more nucleic acid molecules encoding the enzyme having 2-phosphoglycerate phosphatase activity comprises a nucleic acid sequence set forth in SEQ ID NO: 245. In some embodiments, the enzyme having glycerate-2-kinase activity is glxK from E. coli. In yet another embodiment, the one or more nucleic acid molecules encoding the enzyme having glycerate-2-kinase activity comprises an amino acid sequence set forth in SEQ ID NO: 250. In a further embodiment, the one or more nucleic acid molecules encoding the enzyme having glycerate-2-kinase activity comprises a nucleic acid sequence set forth in SEQ ID NO: 249. In some embodiments, the enzyme having glycerate-2-kinase activity is garK from E. coli. In yet another embodiment, the one or more nucleic acid molecules encoding the enzyme having glycerate-2-kinase activity comprises an amino acid sequence set forth in SEQ ID NO: 252. In a further embodiment, the one or more nucleic acid molecules encoding the enzyme having glycerate-2-kinase activity comprises a nucleic acid sequence set forth in SEQ ID NO: 251.

[1049] In some embodiments, an enzyme having 3-phosphoglycerate phosphatase activity or an enzyme having glycerate-3-kinase activity converts 3-phosphoglycerate to glycerate. In some embodiments, the enzyme that converts 3-phosphoglycerate to glycerate is encoded by an amino acid sequence having at least 70% sequence identity, having at least 80% sequence identity, or having at least 90% sequence identity to phoA or GLYK. In some embodiments, the enzyme having 3-phosphoglycerate phosphatase activity is phoA from E. coli. In yet another embodiment, the one or more nucleic acid molecules encoding the enzyme having 3-phosphoglycerate phosphatase activity comprises an amino acid sequence set forth in SEQ ID NO: 246. In a further embodiment, the one or more nucleic acid molecules encoding the enzyme having 3-phosphoglycerate phosphatase activity comprises a nucleic acid sequence set forth in SEQ ID NO: 245. In some embodiments, the enzyme having glycerate-3-kinase activity is GLYK from Arabidopsis thaliana. In yet another embodiment, the one or more nucleic acid molecules encoding the enzyme having glycerate-3-kinase activity comprises an amino acid sequence set forth in SEQ ID NO: 248. In a further embodiment, the one or more nucleic acid molecules encoding the enzyme having glycerate-3-kinase activity comprises a nucleic acid sequence set forth in SEQ ID NO: 247.

[1050] In some embodiments, an enzyme having hydroxypyruvate reductase activity converts glycerate to hydroxypyruvate. In some embodiments, the enzyme that converts glycerate to hydroxypyruvate is encoded by an amino acid sequence having at least 70% sequence identity, having at least 80% sequence identity, or having at least 90% sequence identity to ghrB. In some embodiments, the enzyme having hydroxypyruvate reductase activity is ghrB from E. coli. In yet another embodiment, the one or more nucleic acid molecules encoding the enzyme hydroxypyruvate reductase activity comprises an amino acid sequence set forth in SEQ ID NO: 242. In a further embodiment, the one or more nucleic acid molecules encoding the enzyme hydroxypyruvate reductase activity comprises a nucleic acid sequence set forth in SEQ ID NO: 241.

[1051] In some embodiments, an enzyme having serine decarboxylase activity converts L-serine to ethanolamine. In some embodiments, the enzyme that converts L-serine to ethanolamine is encoded by an amino acid sequence having at least 70% sequence identity, having at least 80% sequence identity, or having at least 90% sequence identity to SDC. In some embodiments, the enzyme having serine decarboxylase activity is SDC from Arabidopsis thaliana. In yet another embodiment, the one or more nucleic acid molecules encoding the enzyme having serine decarboxylase activity comprises an amino acid sequence set forth in SEQ ID NO: 236. In a further embodiment, the one or more nucleic acid molecules encoding the enzyme having serine decarboxylase activity comprises a nucleic acid sequence set forth in SEQ ID NO: 235.

[1052] In some embodiments, an enzyme having ethanolamine aminotransferase activity or an enzyme having ethanolamine oxidoreductase (deaminating) activity converts ethanolamine to glycolaldehyde. In some embodiments, the enzyme that converts ethanolamine to glycolaldehyde is encoded by an amino acid sequence having at least 70% sequence identity, having at least 80% sequence identity, or having at least 90% sequence identity to alaA or tynA. In some embodiments, the enzyme having ethanolamine aminotransferase activity is alaA from E. coli. In yet another embodiment, the one or more nucleic acid molecules encoding the enzyme having ethanolamine aminotransferase activity comprises an amino acid sequence set forth in SEQ ID NO: 240. In a further embodiment, the one or more nucleic acid molecules encoding the enzyme having ethanolamine aminotransferase activity comprises a nucleic acid sequence set forth in SEQ ID NO: 239. In some embodiments, the enzyme having ethanolamine oxidoreductase (deaminating) activity is tynA from E. coli. In yet another embodiment, the one or more nucleic acid molecules encoding the enzyme having ethanolamine oxidoreductase (deaminating) activity comprises an amino acid sequence set forth in SEQ ID NO: 238. In a further embodiment, the one or more nucleic acid molecules encoding the enzyme having ethanolamine oxidoreductase (deaminating) activity comprises a nucleic acid sequence set forth in SEQ ID NO: 237.

[1053] In another aspect, MEG (or glycolic acid) is produced from the lossless transformation of one or more hexose feedstock to one or more pentose-5-phosphate intermediate, followed by a conversion of the one or more pentose-5-phosphate intermediate to one or more pentose and/or pentose-1-phosphate intermediate, followed by a conversion of the one or more pentose and/or pentose-1-phosphate intermediate to MEG (or glycolic acid) and DHAP or pyruvate via a C2 pathway, and a conversion of DHAP or pyruvate to one or more co-product via a C3 pathway. In some embodiments, the C2 pathway comprises embodiment [H]. In further embodiments, the C2 pathway comprises embodiment [I]. In yet further embodiments, the C2 pathway comprises embodiment [J].

[1054] Co-Production of MEG (or Glycolic Acid) Via a C2 Pathway and Acetone, Isopropanol, Propene and/or Isobutene Via a C3 Pathway

[1055] In some embodiments, MEG (or glycolic acid) is produced from the lossless transformation of one or more hexose feedstock to one or more pentose-5-phosphate intermediate, followed by a conversion of the one or more pentose-5-phosphate intermediate to one or more pentose and/or pentose-1-phosphate intermediate, followed by a conversion of the one or more pentose and/or pentose-1-phosphate intermediate to MEG (or glycolic acid) and DHAP or pyruvate via a C2 pathway, and a conversion of DHAP or pyruvate to acetone via a C3 pathway. In some embodiments, the C2 pathway comprises embodiment [H]. In further embodiments, the C2 pathway comprises embodiment [I]. In yet further embodiments, the C2 pathway comprises embodiment [J].

[1056] In some embodiments, the C2 pathway for production of MEG (or glycolic acid) comprises embodiment [H] and the C3 pathway for production of acetone comprises embodiment [M]. In some embodiments, the C2 pathway for production of MEG (or glycolic acid) comprises embodiment [I] and the C3 pathway for production of acetone comprises embodiment [M]. In some embodiments, the C2 pathway for production of MEG (or glycolic acid) comprises embodiment [J] and the C3 pathway for production of acetone comprises embodiment [M].

[1057] [M] In one embodiment, the application relates to a recombinant microorganism capable of co-producing monoethylene glycol (MEG) (or glycolic acid) and acetone, from one or more hexose feedstock, wherein the recombinant microorganism from embodiment [A] or from embodiment [B] (and optionally comprising embodiment [C]), and comprising additionally one or more of embodiments [D], [E], [F] and [G], further comprising one or more of embodiments [H], [I], and [J], further expresses one or more of the following from (a) to (c):

[1058] (a) at least one endogenous or exogenous nucleic acid molecule encoding an enzyme having thiolase or acetyl coenzyme A acetyltransferase activity that catalyzes the conversion of acetyl-CoA to acetoacetyl-CoA;

[1059] (b) at least one endogenous or exogenous nucleic acid molecule encoding an enzyme having acetyl-CoA:acetoacetate-CoA transferase activity or an enzyme having acetate:acetoacetyl-CoA hydrolase activity that catalyzes the conversion of acetoacetyl-CoA from (a) to acetoacetate; and/or

[1060] (c) at least one endogenous or exogenous nucleic acid molecule encoding an enzyme having acetoacetate decarboxylase activity that catalyzes the conversion of acetoacetate from (b) to acetone;

wherein the produced intermediate DHAP from embodiments [H] and/or [I] and/or pyruvate from embodiment [J] is converted to acetyl-CoA through endogenous glycolysis in the microorganism, and wherein MEG (or glycolic acid) and acetone are co-produced.

[1061] In some embodiments, MEG (or glycolic acid) is produced from the lossless transformation of one or more hexose feedstock to one or more pentose-5-phosphate intermediate, followed by a conversion of the one or more pentose-5-phosphate intermediate to one or more pentose and/or pentose-1-phosphate intermediate, followed by a conversion of the one or more pentose and/or pentose-1-phosphate intermediate to MEG (or glycolic acid) and DHAP or pyruvate via a C2 pathway, and a conversion of DHAP or pyruvate to isobutene via a C3 pathway. In some embodiments, the C2 pathway comprises embodiment [H]. In further embodiments, the C2 pathway comprises embodiment [I]. In yet further embodiments, the C2 pathway comprises embodiment [J].

[1062] In some embodiments, the C2 pathway for production of MEG (or glycolic acid) comprises embodiment [H] and the C3 pathway for production of isobutene comprises embodiment [N]. In some embodiments, the C2 pathway for production of MEG (or glycolic acid) comprises embodiment [I] and the C3 pathway for production of isobutene comprises embodiment [N]. In some embodiments, the C2 pathway for production of MEG (or glycolic acid) comprises embodiment [J] and the C3 pathway for production of isobutene comprises embodiment [N].

[1063] [N] In some embodiments, the application relates to a recombinant microorganism capable of co-producing monoethylene glycol (MEG) (or glycolic acid) and isobutene via acetone or HMG-CoA, from one or more hexose feedstock, wherein the recombinant microorganism from embodiment [A] or from embodiment [B] (and optionally comprising embodiment [C]), and comprising additionally one or more of embodiments [D], [E], [F] and [G], further comprising one or more of embodiments [H], [I], and [J], further expresses one or more of the following from (a) to (d):

[1064] (a) at least one endogenous or exogenous nucleic acid molecule encoding an enzyme having thiolase or acetyl coenzyme A acetyltransferase activity that catalyzes the conversion of acetyl-CoA to acetoacetyl-CoA;

[1065] (b) at least one endogenous or exogenous nucleic acid molecule encoding an enzyme having acetyl-CoA:acetoacetate-CoA transferase activity or an enzyme having acetate:acetoacetyl-CoA hydrolase activity that catalyzes the conversion of acetoacetyl-CoA from (a) to acetoacetate;

[1066] (c) at least one endogenous or exogenous nucleic acid molecule encoding an enzyme having acetoacetate decarboxylase activity that catalyzes the conversion of acetoacetate from (b) to acetone;

[1067] (d) at least one endogenous or exogenous nucleic acid molecule encoding an enzyme having 3-hydroxyisovalerate synthase activity that catalyzes the conversion of acetone from (c) and acetyl-CoA to 3-hydroxyisovalerate (3HIV);

[1068] or

wherein the recombinant microorganism expresses one or more of the following from (e) to (j):

[1069] (e) at least one endogenous or exogenous nucleic acid molecule encoding an enzyme having thiolase or acetyl coenzyme A acetyltransferase activity that catalyzes the conversion of acetyl-CoA to acetoacetyl-CoA;

[1070] (f) at least one endogenous or exogenous nucleic acid molecule encoding an enzyme having hydroxymethylglutaryl-CoA synthase activity that catalyzes the conversion of acetoacetyl-CoA from (e) and acetyl-CoA to 3-hydroxy-3-methylglutaryl-CoA (HMG-CoA);

[1071] (g) at least one endogenous or exogenous nucleic acid molecule encoding an enzyme having methylglutaconyl-CoA hydratase activity that catalyzes the conversion of HMG-CoA from (f) to 3-methylglutaconyl-CoA;

[1072] (h) at least one endogenous or exogenous nucleic acid molecule encoding an enzyme having methylcrotonyl-CoA carboxylase activity that catalyzes the conversion of 3-methylglutaconyl-CoA from (g) to 3-methylcrotonyl-CoA;

[1073] (i) at least one endogenous or exogenous nucleic acid molecule encoding an enzyme having methylcrotonyl-CoA hydratase activity that catalyzes the conversion of 3-methylcrotonyl-CoA from (h) to 3-hydroxyisovaleryl-CoA;

[1074] (j) at least one endogenous or exogenous nucleic acid molecule encoding an enzyme having 3-hydroxyisovaleryl-CoA thioesterase activity that catalyzes the conversion of 3-hydroxyisovaleryl-CoA from (i) to 3HIV;

wherein the recombinant microorganism further expresses (a1) and (a2), and/or (b1) selected from:

[1075] (a1) at least one endogenous or exogenous nucleic acid molecule encoding an enzyme having 3HIV kinase activity that catalyzes the conversion of 3HIV from (d) or (j) to 3HIV-3-phosphate;

[1076] (a2) at least one endogenous or exogenous nucleic acid molecule encoding an enzyme having 3HIV-3-phosphate decarboxylase activity that catalyzes the conversion of 3HIV-3-phosphate from (a1) to isobutene;

[1077] (b1) at least one endogenous or exogenous nucleic acid molecule encoding a an enzyme having 3HIV decarboxylase activity that catalyzes the conversion of 3HIV from (d) or (j) to isobutene;

wherein the produced intermediate DHAP from embodiments [H] and/or [I] and/or pyruvate from embodiment [J] is converted to acetyl-CoA through endogenous glycolysis in the microorganism, and wherein MEG (or glycolic acid) and isobutene are co-produced.

[1078] In some embodiments, MEG (or glycolic acid) is produced from the lossless transformation of one or more hexose feedstock to one or more pentose-5-phosphate intermediate, followed by a conversion of the one or more pentose-5-phosphate intermediate to one or more pentose and/or pentose-1-phosphate intermediate, followed by a conversion of the one or more pentose and/or pentose-1-phosphate intermediate to MEG (or glycolic acid) and DHAP or pyruvate via a C2 pathway, and a conversion of DHAP or pyruvate to isopropanol via a C3 pathway. In some embodiments, the C2 pathway comprises embodiment [H]. In further embodiments, the C2 pathway comprises embodiment [I]. In yet further embodiments, the C2 pathway comprises embodiment [J].

[1079] [O] In one embodiment, the recombinant microorganisms from embodiment [M] and/or [N] (optionally comprising embodiment [EE]), optionally further express at least one endogenous or exogenous nucleic acid molecule encoding an enzyme having secondary alcohol dehydrogenase activity that catalyzes the conversion of acetone to isopropanol.

[1080] In some embodiments, the alcohol dehydrogenase has at least 70% sequence identity, at least 80% sequence identity, or at least 90% sequence identity with an alcohol dehydrogenase from Clostridium sp. In other embodiments, the alcohol dehydrogenase is an alcohol dehydrogenase selected from Clostridium beijerinckii adh and Clostridium carboxidivorans adh. In a further embodiment, the alcohol dehydrogenase comprises an amino acid sequence selected from the group consisting of SEQ ID NOs: 138 and 140. In yet another embodiment, the alcohol dehydrogenase is encoded by a nucleic acid sequence selected from the group consisting of SEQ ID NOs: 136, 137, and 139.

[1081] In some embodiments, MEG (or glycolic acid) is produced from the lossless transformation of one or more hexose feedstock to one or more pentose-5-phosphate intermediate, followed by a conversion of the one or more pentose-5-phosphate intermediate to one or more pentose and/or pentose-1-phosphate intermediate, followed by a conversion of the one or more pentose and/or pentose-1-phosphate intermediate to MEG (or glycolic acid) and DHAP or pyruvate via a C2 pathway, and a conversion of DHAP or pyruvate to propene via a C3 pathway. In some embodiments, the C2 pathway comprises embodiment [H]. In further embodiments, the C2 pathway comprises embodiment [I]. In yet further embodiments, the C2 pathway comprises embodiment [J].

[1082] [P] In another embodiment, the recombinant microorganisms from embodiment [O] (optionally comprising embodiment [EE]), optionally further expresses at least one endogenous or exogenous nucleic acid molecule encoding an enzyme having dehydratase activity that catalyzes the conversion of isopropanol to propene.

[1083] In one embodiment of any pathway disclosed above for isobutene co-production, the enzyme having 3-hydroxyisovalerate synthase activity is encoded by one or more nucleic acid molecules obtained from a microorganism selected from Mus sp., Saccharomyces sp., Lactobacillus sp. and Polaromonas sp. In another embodiment, the enzyme having 3-hydroxyisovalerate synthase activity is encoded by one or more nucleic acid molecules obtained from a microorganism selected from Mus musculus, Saccharomyces cerevisiae, Lactobacillus crispatus and Polaromonas naphthalenivorans. In some embodiments, the one or more nucleic acid molecules encoding the enzyme having 3-hydroxyisovalerate synthase activity is selected from Hmgcs1, ERG13, PksG and/or Pnap_0477, or homolog thereof. In a further embodiment, the one or more nucleic acid molecules encoding the enzyme having 3-hydroxyisovalerate synthase activity comprises an amino acid sequence selected from the group consisting of SEQ ID NOs: 105, 107, 109 and 111. In yet another embodiment, the one or more nucleic acid molecules encoding the enzyme having 3-hydroxyisovalerate synthase activity comprises a nucleic acid sequence selected from the group consisting of SEQ ID NOs: 104, 106, 108 and 110.

[1084] In one embodiment of any pathway disclosed above for isobutene co-production, the enzyme having hydroxymethylglutaryl-CoA synthase activity is encoded by one or more nucleic acid molecules obtained from Saccharomyces sp. In another embodiment, the enzyme having hydroxymethylglutaryl-CoA synthase activity is encoded by one or more nucleic acid molecules obtained from Saccharomyces cerevisiae. In some embodiments, the one or more nucleic acid molecules encoding the enzyme having hydroxymethylglutaryl-CoA synthase activity is HmgS, or homolog thereof. In a further embodiment, the one or more nucleic acid molecules encoding the enzyme having hydroxymethylglutaryl-CoA synthase activity comprises an amino acid sequence set forth in SEQ ID NO: 123. In yet another embodiment, the one or more nucleic acid molecules encoding the enzyme having hydroxymethylglutaryl-CoA synthase activity comprises a nucleic acid sequence set forth in SEQ ID NO: 122.

[1085] In one embodiment of any pathway disclosed above for isobutene co-production, the enzyme having methylglutaconyl-CoA hydratase activity is encoded by one or more nucleic acid molecules obtained from Pseudomonas sp. In another embodiment, the enzyme having methylglutaconyl-CoA hydratase activity is encoded by one or more nucleic acid molecules obtained from Pseudomonas putida. In some embodiments, the one or more nucleic acid molecules encoding the enzyme having methylglutaconyl-CoA hydratase activity is liuC, or homolog thereof. In a further embodiment, the one or more nucleic acid molecules encoding the enzyme having methylglutaconyl-CoA hydratase activity comprises an amino acid sequence set forth in SEQ ID NO: 125. In yet another embodiment, the one or more nucleic acid molecules encoding the enzyme having methylglutaconyl-CoA hydratase activity comprises a nucleic acid sequence set forth in SEQ ID NO: 124.

[1086] In one embodiment of any pathway disclosed above for isobutene co-production, the enzyme having methylcrotonyl-CoA carboxylase activity is encoded by one or more nucleic acid molecules obtained from Pseudomonas sp. In another embodiment, the enzyme having methylcrotonyl-CoA carboxylase activity is encoded by one or more nucleic acid molecules obtained from Pseudomonas aeruginosa. In some embodiments, the one or more nucleic acid molecules encoding the enzyme having methylcrotonyl-CoA carboxylase activity is liuB, and/or liuD, or homologs thereof. In a further embodiment, the one or more nucleic acid molecules encoding the enzyme having methylcrotonyl-CoA carboxylase activity comprises an amino acid sequence selected from SEQ ID NOs: 127 and 129. In yet another embodiment, the one or more nucleic acid molecules encoding the enzyme having methylcrotonyl-CoA carboxylase activity comprises a nucleic acid sequence selected from SEQ ID NOs: 126 and 128.

[1087] In one embodiment of any pathway disclosed above for isobutene co-production, the enzyme having methylcrotonyl-CoA hydratase activity is a 3-ketoacyl-CoA thiolase. In another embodiment, the enzyme having methylcrotonyl-CoA hydratase activity is an enoyl-CoA hydratase. In another embodiment, the enzyme having methylcrotonyl-CoA hydratase activity is encoded by one or more nucleic acid molecules obtained from E. coli. In some embodiments, the one or more nucleic acid molecules encoding the enzyme having methylcrotonyl-CoA hydratase activity is fadA, and/or fadB, or homologs thereof. In a further embodiment, the one or more nucleic acid molecules encoding the enzyme having methylcrotonyl-CoA hydratase activity comprises an amino acid sequence selected from SEQ ID NOs: 131 and 133. In yet another embodiment, the one or more nucleic acid molecules encoding the enzyme having methylcrotonyl-CoA hydratase activity comprises a nucleic acid sequence selected from SEQ ID NOs: 130 and 132.

[1088] In one embodiment of any pathway disclosed above for isobutene co-production, the enzyme having 3-hydroxyisovaleryl-CoA thioesterase activity is encoded by one or more nucleic acid molecules obtained from E. coli. In some embodiments, the one or more nucleic acid molecules encoding the enzyme having 3-hydroxyisovaleryl-CoA thioesterase activity is tesB, or homolog thereof. In a further embodiment, the one or more nucleic acid molecules encoding the enzyme having 3-hydroxyisovaleryl-CoA thioesterase activity comprises an amino acid sequence set forth in SEQ ID NO: 135. In yet another embodiment, the one or more nucleic acid molecules encoding the enzyme having 3-hydroxyisovaleryl-CoA thioesterase activity comprises a nucleic acid sequence set forth in SEQ ID NO: 134.

[1089] In one embodiment of any pathway disclosed above for isobutene co-production, the enzyme having 3HIV kinase activity is encoded by one or more nucleic acid molecules obtained from a microorganism selected from the group consisting of Thermoplasma sp. and Picrophilus sp. In another embodiment, the enzyme having 3HIV kinase activity is encoded by one or more nucleic acid molecules obtained from a microorganism selected from the group consisting of Thermoplasma acidophilum and Picrophilus torridus. In some embodiments, the one or more nucleic acid molecules encoding the enzyme having 3HIV kinase activity is TA1305 and/or PTO1356, or homolog thereof. In some embodiments, the TA1305 comprises a L200E mutation. In a further embodiment, the one or more nucleic acid molecules encoding the enzyme having 3HIV kinase activity comprises an amino acid sequence selected from the group consisting of SEQ ID NOs: 113, 115 and 117. In yet another embodiment, the one or more nucleic acid molecules encoding the enzyme having 3HIV kinase activity comprises a nucleic acid sequence selected from the group consisting of SEQ ID NOs: 112, 114 and 116.

[1090] In one embodiment of any pathway disclosed above for isobutene co-production, the enzyme having 3HIV-3-phosphate decarboxylase activity is encoded by one or more nucleic acid molecules obtained from Streptococcus sp. In another embodiment, the enzyme having 3HIV-3-phosphate decarboxylase activity is encoded by one or more nucleic acid molecules obtained from a microorganism selected from Streptococcus mitis and Streptococcus gordonii. In some embodiments, the one or more nucleic acid molecules encoding the enzyme having 3HIV-3-phosphate decarboxylase activity comprises smi_1746 and/or mvaD, or homolog thereof. In a further embodiment, the one or more nucleic acid molecules encoding the enzyme having 3HIV-3-phosphate decarboxylase activity comprises an amino acid sequence selected from SEQ ID NOs: 119 and 121. In yet another embodiment, the one or more nucleic acid molecules encoding the enzyme having 3HIV-3-phosphate decarboxylase activity comprises a nucleic acid sequence selected from SEQ ID NOs: 118 and 120.

[1091] In one embodiment of any pathway disclosed above for isobutene co-production, the enzyme having 3HIV decarboxylase activity is encoded by one or more nucleic acid molecules obtained from a microorganism selected from the group consisting of Streptococcus sp., Thermoplasma sp. and Picrophilus sp. In another embodiment, the enzyme having 3HIV decarboxylase activity is encoded by one or more nucleic acid molecules obtained from a microorganism selected from the group consisting of Streptococcus gordonii, Thermoplasma acidophilum and Picrophilus torridus. In some embodiments, the one or more nucleic acid molecules encoding the enzyme having 3HIV decarboxylase activity comprises mvaD, TA1305 and/or PTO1356, or homolog thereof. In a further embodiment, the one or more nucleic acid molecules encoding the enzyme having 3HIV decarboxylase activity comprises an amino acid sequence selected from the group consisting of SEQ ID NOs: 113, 117 and 121. In yet another embodiment, the one or more nucleic acid molecules encoding the enzyme having 3HIV decarboxylase activity comprises a nucleic acid sequence selected from the group consisting of SEQ ID NOs: 112, 116 and 120.

[1092] Co-Production of MEG (or Glycolic Acid) Via a C2 Pathway and One or More Serine Pathway Compound Via a C3 Pathway

[1093] In some embodiments, the production of MEG via a C2 pathway is coupled to the production of one or more serine pathway compound via a C3 pathway. In one embodiment, one or more serine pathway compound relates to the L-serine biosynthetic pathway. In another embodiment, the one or more serine pathway compound is L-serine (Ser), glycine (Gly), monoethanolamine (MEA), and/or ethylenediamine (EDA) (FIG. 10).

[1094] Production of Monoethylene Glycol (MEG) or Glycolic Acid Via One or More C2 Pathway

[1095] To produce MEG, one or more hexose sugar or hexose feedstock is converted to one or more pentose-5-phosphate intermediates via a non-oxidative entry into the pentose phosphate pathway in a manner that preserves yield potential, as described above. The one or more pentose-5-phosphate intermediates are then converted to one or more pentose-1-phosphate or pentose intermediates by pentose-5-phosphatases, D-arabitol phosphate dehydrogenases and/or phosphopentomutases (as described above). The one or more pentose-1-phosphate or pentose intermediates are then degraded by known C2 pathways (D-xylulose-1-phosphate pathway (Alkim et al., Microb Cell Fact (2015) 14:127), D-ribulose-1-phosphate pathway (WO2013/126721), or D-xylonate pathway (WO2013/119020)) into the C2 carbon compound glycolaldehyde and the C3 carbon compound dihydroxy acetonephosphate (DHAP) or pyruvate by an aldolase. Glycolaldehyde is reduced to MEG, consuming an NADH. Alternatively, glycolaldehyde can be oxidized by a glycolaldehyde dehydrogenase to glycolic acid. The C3 compound DHAP is further oxidized to one or more of the L-serine pathway compounds Ser, Gly, MEA, or EDA, producing NADH.

[1096] Ammonia (NH₃)

[1097] Ammonia is a compound of nitrogen and hydrogen with the formula NH₃, which serves as a precursor to food and fertilizers as well as a building block for the synthesis of pharmaceutical products and commercial cleaning products. Ammonia is present as an ammonium cation when it is positively charged, whose chemical formula is NH₄⁺.

[1098] The present disclosure teaches that ammonia or a similar compound is utilized as nitrogen source. When ammonia or a similar compound is used as a nitrogen source, it is fixed into organic matter, for example, glutamate. In one embodiment, when 2-oxoglutarate is usually formed into glutamate, the ammonia is fixed and this process consumes one NADH.

[1099] Production of L-serine (Ser)

[1100] Ser is produced by the natural pathway via phosphoserine or a variation thereof. In one embodiment, DHAP produced from the production of MEG (or glycolic acid) via a C2 pathway is converted by endogenous glycolysis in the microorganism to 3-phospho-D-glycerate (3-phosphoglycerate). 3-phosphoglycerate is converted to 3-phosphohydroxypyruvate by a D-3-phosphoglycerate dehydrogenase (EC 1.1.1.95). The 3-phosphohydroxypyruvate is then converted to 3-phosphoserine by a phosphoserine aminotransferase (EC 2.6.1.52). The 3-phosphoserine is then converted to L-serine by a phosphoserine phosphatase (EC 3.1.3.3).

[1101] In some embodiments the reaction from 3-phosphoglycerate to L-serine is the following:

[1102] 3-phospho-D-glycerate+NAD⁺+L-glutamate+H2O→L-serine+NADH+2-oxoglutarate+phosphate

[1103] Considering the production of two NADH from DHAP to 3-phosphohydroxypyruvate and one NADH required for fixation of NH₃, Ser production produces exactly one excess NADH, which is needed for the equimolar co-production of one MEG (or glycolic acid).

[1104] In some embodiments, the production of MEG (or glycolic acid) and L-serine is very close to the thermodynamic maximum yield potential using the lossless conversion of one or more hexose to one or more pentose-5-phosphate intermediates, followed by the conversion of the one or more pentose-5-phosphate intermediates to one or more pentose-1-phosphate and/or pentose intermediates, and then followed by the co-production of MEG (or glycolic acid) via a C2 pathway and L-serine via a C3 pathway from the one or more pentose-1-phosphate and/or pentose intermediates. In some embodiments, the thermodynamic yield potential is 14% better for co-production of MEG (or glycolic acid) and L-serine via the pathways disclosed in the present application compared to production of L-serine made from glucose by the natural, standard C3 pathway.

[1105] Co-production: hexose+NH₃→MEG (or glycolic acid)+Ser+0 ATP

[1106] Y(pathway)=(0.371+0.629) g/g=1.00 g (MEG (or glycolic acid)+Ser)/g(hexose+NH₃), 96% of Y(max)(heat of combustion)=1.044 g/g

[1107] Standard pathway: glucose+2 NH₃→2 Ser+2 NADH+0 ATP

[1108] Y(pathway)=0.981 g (Ser)/g(glucose+2NH₃), 84% of Y(max)(heat of combustion)=1.164 g/g

[1109] In some embodiments, MEG (or glycolic acid) and serine are co-produced from the lossless transformation of one or more hexose feedstock to one or more pentose-5-phosphate intermediate, followed by a conversion of the one or more pentose-5-phosphate intermediate to one or more pentose and/or pentose-1-phosphate intermediate, followed by a conversion of the one or more pentose and/or pentose-1-phosphate intermediate to MEG (or glycolic acid) and DHAP or pyruvate via a C2 pathway, and a conversion of DHAP or pyruvate to serine via a C3 pathway. In some embodiments, the C2 pathway comprises embodiment [H]. In further embodiments, the C2 pathway comprises embodiment [I]. In yet further embodiments, the C2 pathway comprises embodiment [J].

[1110] In some embodiments, the C2 pathway for production of MEG (or glycolic acid) comprises embodiment [H] and the C3 pathway for production of serine comprises embodiment [Q]. In some embodiments, the C2 pathway for production of MEG (or glycolic acid) comprises embodiment [I] and the C3 pathway for production of serine comprises embodiment [Q]. In some embodiments, the C2 pathway for production of MEG (or glycolic acid) comprises embodiment [J] and the C3 pathway for production of serine comprises embodiment [Q].

[1111] [Q] In one embodiment, the application relates to a recombinant microorganism capable of co-producing monoethylene glycol (MEG) (or glycolic acid) and serine, from one or more hexose feedstock and a nitrogen source, wherein the recombinant microorganism from embodiment [A] or from embodiment [B] (and optionally comprising embodiment [C]), and comprising additionally one or more of embodiments [D], [E], [F] and [G], further comprising one or more of embodiments [H], [I], and [J], further expresses one or more of the following from (a) to (h):

[1112] (a) at least one endogenous or exogenous nucleic acid molecule encoding an enzyme having 3-phosphoglycerate dehydrogenase activity that catalyzes the conversion of 3-phosphoglycerate to 3-phosphohydroxypyruvate;

[1113] (b) at least one endogenous or exogenous nucleic acid molecule encoding an enzyme having 3-phosphoglycerate phosphatase activity and/or an enzyme having glycerate 3-kinase activity that catalyzes the conversion of 3-phosphoglycerate to glycerate;

[1114] (c) at least one endogenous or exogenous nucleic acid molecule encoding an enzyme having 2-phosphoglycerate phosphatase activity and/or an enzyme having glycerate 2-kinase activity that catalyzes the conversion of 2-phosphoglycerate to glycerate;

[1115] (d) at least one endogenous or exogenous nucleic acid molecule encoding an enzyme having phosphoserine aminotransferase activity that catalyzes the conversion of 3-phosphohydroxypyruvate from (a) to phospho-L-serine;

[1116] (e) at least one endogenous or exogenous nucleic acid molecule encoding an enzyme having 3-phosphohydroxypyruvate phosphatase activity that catalyzes the conversion of 3-phosphohydroxypyruvate from (a) to hydroxypyruvate;

[1117] (f) at least one endogenous or exogenous nucleic acid molecule encoding an enzyme having phosphoserine phosphatase activity that catalyzes the conversion of phospho-L-serine from (d) to L-serine;

[1118] (g) at least one endogenous or exogenous nucleic acid molecule encoding an enzyme having hydroxypyruvate reductase activity that catalyzes the conversion of glycerate from (b) and/or (c) to hydroxypyruvate;

[1119] (h) at least one endogenous or exogenous nucleic acid molecule encoding an enzyme having serine-pyruvate aminotransferase activity that catalyzes the conversion of hydroxypyruvate from (e) and/or (g) to L-serine;

wherein the produced intermediate DHAP from embodiments [H] and/or [I] and/or pyruvate from embodiment [J] is converted to 3-phosphoglycerate and/or 2-phosphoglycerate through endogenous glycolysis or gluconeogenesis in the microorganism, and wherein MEG (or glycolic acid) and serine are produced.

[1120] Production of Glycine (Gly)

[1121] Gly is produced by natural pathways, for instance via Ser, or variations thereof.

[1122] In one embodiment, Gly is produced via a Ser based pathway. In the Ser based pathway, 5,10-methylene tetrahydrofolate (M-THF) is produced from THF and L-serine is converted to glycine by a serine hydroxymethyltransferase. M-THF is utilized in the biosynthesis of various cellular compounds, for instance in methylation reactions.

[1123] In a preferred embodiment, M-THF can also be used to produce two more NADH or one NADH and one H2:

[1124] M-THF+H₂O↔THF+formaldehyde (EC 2.1.2.-; transferases such as hydroxymethyl-, formyl- and related transferases that transfers one-carbon group), subsequent oxidation of formaldehyde (EC 1.2.1.46; formaldehyde dehydrogenase) to formate and NADH, and further oxidation of formate to CO₂ and NADH (formate dehydrogenase, FDH) or CO₂ and H2 (formate hydrogenlyase complex).

[1125] In some embodiments, this reconstitution of THF, if done partially, can be used to generate just enough NADH to perform another, distinct glycine biosynthesis route. In one embodiment, the route via the glycine cleavage system, which utilizes M-THF, NH₃, CO₂ and NADH to synthesize glycine directly, can be used together with the serine based glycine production to utilize the generated excess M-THF to generate more glycine.

[1126] The glycine-cleavage system (GCV) is a multienzyme complex that catalyzes the reversible oxidation of glycine, yielding carbon dioxide, ammonia, 5,10-methylenetetrahydrofolate (M-THF) and a reduced pyridine nucleotide:

[1127] Glycine+THF+NAD⁺↔M-THF+CO₂+NH₃+NADH+H⁺

[1128] Tetrahydrofolate serves as a recipient for one-carbon units generated during glycine cleavage to form the methylene group. The GCV system consists of four protein components, the P protein, H protein, T protein, and L protein. P protein (EC 1.4.4.2, glycine dehydrogenase (decarboxylating)) catalyzes the pyridoxal phosphate-dependent liberation of CO₂ from glycine, leaving a methylamine moiety. The methylamine moiety is transferred to the lipoic acid group of the H protein, which is bound to the P protein prior to decarboxylation of glycine. The T protein (EC 2.1.2.10, aminomethyltransferase) catalyzes the release of NH₃ from the methylamine group and transfers the remaining C1 unit to THF, forming 5,10-mTHF. The L protein (EC 1.8.1.4, dihydrolipoyl dehydrogenase) then oxidizes the lipoic acid component of the H protein and transfers the electrons to NAD+, forming NADH.

[1129] The same set of enzymes is sometimes referred to as glycine synthase when it runs in the reverse direction to form glycine. In the anaerobic bacteria, Clostridium acidiurici, the glycine cleavage system runs mostly in the direction of glycine synthesis.

[1130] Alternatively, in another embodiment, glycine can also be produced via transamination of glyoxylate by alanine-glyoxylate aminotransferase (EC 2.6.1.44). Though in organisms like Saccharomyces cerevisiae, this pathway is only expressed during growth on non-fermentable carbon sources like ethanol or acetate, this pathway can be readily overexpressed in any microorganism. The amino group donor alanine gets reconstituted by transamination with glutamate (alanine transaminase, EC 2.6.1.2), which in turn gets reconstituted by fixation of ammonia by a NADH or NADPH dependent glutamate dehydrogenase (EC 1.4.1.2 or EC 1.4.1.3). In one embodiment, this glycine pathway avoids the intermediate L-serine and does not lead to the production of M-THF, but rather directly produces two reducing equivalents such as NADH.

[1131] In some embodiments, the production of MEG (or glycolic acid) and glycine is closer to the thermodynamic maximum yield potential using the lossless conversion of one or more hexose to one or more pentose-5-phosphate intermediates, followed by the conversion of the one or more pentose-5-phosphate intermediates to one or more pentose-1-phosphate and/or pentose intermediates, and then followed by the co-production of MEG (or glycolic acid) via a C2 pathway and glycine via a C3 pathway from the one or more pentose-1-phosphate and/or pentose intermediates. In some embodiments, the thermodynamic yield potential is 37% better for co-production of MEG (or glycolic acid) and glycine via the pathways disclosed in the present application compared to production of glycine made from glucose by the natural, standard C3 pathway.

[1132] Co-production, serine pathway: hexose+NH₃+THF->MEG (or glycolic acid)+Gly+M-THF+0 ATP

[1133] Co-production, serine pathway, assuming THF reconstitution via formate and using FDH:

[1134] hexose+NH₃->MEG (or glycolic acid)+Gly+2 NADH+0 ATP

[1135] Co-production, glyoxylate pathway: hexose+NH₃->MEG (or glycolic acid)+Gly+2 NAD(P)H+0 ATP

[1136] Y(pathway)=(0.371+0.449) g/g=0.820 g(MEG (or glycolic acid)+Gly)/g(hexose+NH₃), 81% of Y(max)(heat of combustion)=1.013 g/g

[1137] Co-production, serine pathway, assuming partial THF reconstitution via formate and FDH plus glycine synthesis via glycine cleavage system:

[1138] Partial THF reconstitution through NADH production: M-THF->2/3 M-THF+1/3 THF+2/3 NADH

[1139] Utilization of remaining M-THF and generated NADH for glycine cleavage system:

[1140] 2/3 M-THF+2/3 NADH+2/3 NH3+2/3 CO₂->2/3 Gly

[1141] hexose+5/3 NH_{3+2/3} CO₂->MEG (or glycolic acid)+5/3 Gly+0 ATP

[1142] y(pathway)=(0.348+0.698)g/g=1.046 g/g, 97% of y(max)=1.076 g/g

[1143] Standard pathway: glucose+2 NH₃₊₂ THF->2 Gly+2 M-THF+2 NADH+0 ATP

[1144] Y(pathway)=0.701 g(Gly)/g(glucose+2NH3), 59% of Y(max)(heat of combustion)=1.197 g/g

[1145] In some embodiments, MEG (or glycolic acid) and glycine are co-produced from the lossless transformation of one or more hexose feedstock to one or more pentose-5-phosphate intermediate, followed by a conversion of the one or more pentose-5-phosphate intermediate to one or more pentose and/or pentose-1-phosphate intermediate, followed by a conversion of the one or more pentose and/or pentose-1-phosphate intermediate to MEG (or glycolic acid) and DHAP or pyruvate via a C2 pathway, and a conversion of DHAP or pyruvate to glycine via a C3 pathway. In some embodiments, the C2 pathway comprises embodiment [H]. In further embodiments, the C2 pathway comprises embodiment [I]. In yet further embodiments, the C2 pathway comprises embodiment [J].

[1146] In some embodiments, the C2 pathway for production of MEG (or glycolic acid) comprises embodiment [H] and the C3 pathway for production of glycine comprises embodiment [R]. In other embodiments, the C2 pathway for production of MEG (or glycolic acid) comprises embodiment [H] and the C3 pathway for production of glycine comprises embodiment [S]. In further embodiments, the C2 pathway for production of MEG (or glycolic acid) comprises embodiment [H] and the C3 pathway for production of glycine comprises embodiment [T]. In some embodiments, the C2 pathway for production of MEG (or glycolic acid) comprises embodiment [I] and the C3 pathway for production of glycine comprises embodiment [R]. In other embodiments, the C2 pathway for production of MEG (or glycolic acid) comprises embodiment [I] and the C3 pathway for production of glycine comprises embodiment [S]. In further embodiments, the C2 pathway for production of MEG (or glycolic acid) comprises embodiment [I] and the C3 pathway for production of glycine comprises embodiment [T]. In some embodiments, the C2 pathway for production of MEG (or glycolic acid) comprises embodiment [J] and the C3 pathway for production of glycine comprises embodiment [R]. In other embodiments, the C2 pathway for production of MEG (or glycolic acid) comprises embodiment [J] and the C3 pathway for production of glycine comprises embodiment [S]. In further embodiments, the C2 pathway for production of MEG (or glycolic acid) comprises embodiment [J] and the C3 pathway for production of glycine comprises embodiment [T].

[1147] [R] In one embodiment, the application relates to a recombinant microorganism capable of producing monoethylene glycol (MEG) (or glycolic acid) and glycine, from one or more hexose feedstock and a nitrogen source, wherein the recombinant microorganism from embodiment [A] or from embodiment [B] (and optionally comprising embodiment [C]), and comprising additionally one or more of embodiments [D], [E], [F] and [G], further comprising one or more of embodiments [H], [I], and [J], further expresses one or more of the following from (a) to (e):

[1148] (a) at least one endogenous or exogenous nucleic acid molecule encoding an enzyme having serine hydroxymethyltransferase activity that catalyzes the conversion of L-serine and tetrahydrofolate (THF) to glycine and 5,10-methylene tetrahydrofolate (M-THF);

[1149] (b) at least one endogenous or exogenous nucleic acid molecule encoding an enzyme having transferase activity that catalyzes the conversion of M-THF from (a) to formaldehyde;

[1150] (c) at least one endogenous or exogenous nucleic acid molecule encoding an enzyme having formaldehyde dehydrogenase activity that catalyzes the conversion of formaldehyde from (b) to formate and NADH;

[1151] (d) at least one endogenous or exogenous nucleic acid molecule encoding an enzyme having formate dehydrogenase activity that catalyzes the conversion of formate from (c) to CO₂ and NADH;

[1152] (e) at least one endogenous or exogenous nucleic acid molecule encoding a protein of the glycine cleavage system that catalyze the conversion of M-THF from (a), CO₂, NH₃ and NADH from (c) or (d) to glycine and THF;

wherein THF is reconstituted from steps (b) through (e), wherein optionally formate from (c) is further oxidized to CO₂ and H2 by a formate hydrogenaselyase complex, and wherein MEG (or glycolic acid) and glycine are produced.

[1153] [S] In one embodiment, the application relates to a recombinant microorganism capable of co-producing monoethylene glycol (MEG) (or glycolic acid) and glycine, from one or more hexose feedstock and a nitrogen source, wherein the recombinant microorganism from embodiment [A] or from embodiment [B] (and optionally comprising embodiment [C]), and comprising additionally one or more of embodiments [D], [E], [F] and [G], further comprising one or more of embodiments [H], [I], and [J], further expresses one or more of the following from (a) to (k):

[1154] (a) at least one endogenous or exogenous nucleic acid molecule encoding an enzyme having 3-phosphoglycerate dehydrogenase activity that catalyzes the conversion of 3-phosphoglycerate to 3-phosphohydroxypyruvate;

[1155] (b) at least one endogenous or exogenous nucleic acid molecule encoding an enzyme having phosphoserine aminotransferase activity that catalyzes the conversion of 3-phosphohydroxypyruvate from (a) to phospho-L-serine;

[1156] (c) at least one endogenous or exogenous nucleic acid molecule encoding an enzyme having 3-phosphohydroxypyruvate phosphatase activity that catalyzes the conversion of 3-phosphohydroxypyruvate from (a) to hydroxypyruvate;

[1157] (d) at least one endogenous or exogenous nucleic acid molecule encoding an enzyme having phosphoserine phosphatase activity that catalyzes the conversion of phospho-L-serine from (b) to L-serine;

[1158] (e) at least one endogenous or exogenous nucleic acid molecule encoding an enzyme having L-serine transaminase or serine oxidase activity that catalyzes the conversion of L-serine from (d) to hydroxypyruvate;

[1159] (f) at least one endogenous or exogenous nucleic acid molecule encoding an enzyme having hydroxypyruvate decarboxylase activity that catalyzes the conversion of hydroxypyruvate from (c) or (e) to glycolaldehyde;

[1160] (g) at least one endogenous or exogenous nucleic acid molecule encoding an enzyme having glycolaldehyde dehydrogenase activity that catalyzes the conversion of glycolaldehyde from (f) to glycolic acid;

[1161] (h) at least one endogenous or exogenous nucleic acid molecule encoding an enzyme having glycolate dehydrogenase activity that catalyzes the conversion of glycolic acid from (g) to glyoxylate;

[1162] (i) at least one endogenous or exogenous nucleic acid molecule encoding an enzyme having alanine-glyoxylate aminotransferase activity that catalyzes the conversion of glyoxylate from (h) and alanine to glycine and pyruvate;

[1163] (j) at least one endogenous or exogenous nucleic acid molecule encoding an enzyme having alanine transaminase activity that catalyzes the conversion of pyruvate from (i) and glutamate to alanine and 2-oxoglutarate;

[1164] (k) at least one endogenous or exogenous nucleic acid molecule encoding an enzyme having NAD(P)H dependent glutamate dehydrogenase activity that catalyzes the conversion of 2-oxoglutarate from (j) and ammonia to glutamate;

wherein the produced intermediate DHAP from embodiments [H] and/or [I] and/or pyruvate from embodiment [J] is converted to 3-phosphoglycerate and/or 2-phosphoglycerate through endogenous glycolysis or gluconeogenesis in the microorganism, wherein the glyoxylate for step (i) optionally comes from glyoxylate shunt in the microorganism, wherein alanine and glutamate are reconstituted from steps (j) and (k), and wherein MEG (or glycolic acid) and glycine are co-produced.

[1165] [T] In one embodiment, the application relates to a recombinant microorganism capable of co-producing monoethylene glycol (MEG) (or glycolic acid) and glycine, from one or more hexose feedstock and a nitrogen source, wherein the recombinant microorganism from embodiment [A] or from embodiment [B] (and optionally comprising embodiment [C]), and comprising additionally one or more of embodiments [D], [E], [F] and [G], further comprising one or more of embodiments [H], [I], and [J], further expresses one or more of the following from (a) to (1):

[1166] (a) at least one endogenous or exogenous nucleic acid molecule encoding an enzyme having 2-phosphoglycerate phosphatase activity and/or an enzyme having glycerate-2-kinase activity that catalyzes the conversion of 2-phosphoglycerate to glycerate;

[1167] (b) at least one endogenous or exogenous nucleic acid molecule encoding an enzyme having 3-phosphoglycerate phosphatase activity and/or an enzyme having glycerate-3-kinase activity that catalyzes the conversion of 3-phosphoglycerate to glycerate;

[1168] (c) at least one endogenous or exogenous nucleic acid molecule encoding an enzyme having hydroxypyruvate reductase activity that catalyzes the conversion of glycerate from (a) and/or (b) to hydroxypyruvate;

[1169] (d) at least one endogenous or exogenous nucleic acid molecule encoding an enzyme having serine aminotransferase or serine oxidoreductase (deaminating) activity that catalyzes the conversion of L-serine to hydroxypyruvate;

[1170] (e) at least one endogenous or exogenous nucleic acid molecule encoding an enzyme having L-serine decarboxylase activity that catalyzes the conversion of L-serine to ethanolamine;

[1171] (f) at least one endogenous or exogenous nucleic acid molecule encoding an enzyme having hydroxypyruvate decarboxylase activity that catalyzes the conversion of hydroxypyruvate from (c) and/or (d) to glycolaldehyde;

[1172] (g) at least one endogenous or exogenous nucleic acid molecule encoding an enzyme having ethanolamine aminotransferase activity or an enzyme having ethanolamine oidoreductase (deaminating) activity that catalyzes the conversion of ethanolamine from (e) to glycolaldehyde;

[1173] (h) at least one endogenous or exogenous nucleic acid molecule encoding an enzyme having glycolaldehyde dehydrogenase activity that catalyzes the conversion of glycolaldehyde from (f) and/or (g) to glycolic acid;

[1174] (i) at least one endogenous or exogenous nucleic acid molecule encoding an enzyme having glycolate dehydrogenase activity that catalyzes the conversion of glycolic acid from (g) to glyoxylate;

[1175] (j) at least one endogenous or exogenous nucleic acid molecule encoding an enzyme having alanine-glyoxylate aminotransferase activity that catalyzes the conversion of glyoxylate from (i) and alanine to glycine and pyruvate;

[1176] (k) at least one endogenous or exogenous nucleic acid molecule encoding an enzyme having alanine transaminase activity that catalyzes the conversion of pyruvate from (j) and glutamate to alanine and 2-oxoglutarate;

[1177] (l) at least one endogenous or exogenous nucleic acid molecule encoding an enzyme having NAD(P)H dependent glutamate dehydrogenase activity that catalyzes the conversion of 2-oxoglutarate from (k) and ammonia to glutamate;

wherein the produced intermediate DHAP from embodiments [H] and/or [I] and/or pyruvate from embodiment [J] is converted to 3-phosphoglycerate and/or 2-phosphoglycerate through endogenous glycolysis or gluconeogenesis in the microorganism, wherein the glyoxylate for step (j) optionally comes from glyoxylate shunt in the microorganism, wherein alanine and glutamate are reconstituted from steps (k) and (l), and wherein MEG (or glycolic acid) and glycine are co-produced.

[1178] In some embodiments, an enzyme having serine hydroxymethyltransferase activity converts L-serine to glycine. In some embodiments, the enzyme that converts L-serine to glycine is encoded by an amino acid sequence having at least 70% sequence identity, having at least 80% sequence identity, or having at least 90% sequence identity to E. coli glyA. In some embodiments, the one or more nucleic acid molecule encoding an enzyme having serine hydroxymethyltransferase activity comprises an amino acid sequence set forth in UniProt ID P0A825. In a further embodiment, the one or more nucleic acid molecule encoding an enzyme having serine hydroxymethyltransferase activity is encoded by a nucleic acid sequence set forth in Gene ID 947022.

[1179] In some embodiments, an enzyme having transferase activity that transfers one-carbon groups is used to convert M-THF to formaldehyde. Transferases such as the hydroxymethyl-, formyl- and related transferases may be used. Examples of hydroxymethyl-, formyl- and related transferases include glycine hydroxymethyltransferase, phosphoribosylglycinamide formyltransferase, phosphoribosylaminoimidazolecarboxamide formyltransferase, glycine formimidoyltransferase, glutamate formiminotransferase, D-alanine 2-hydroxymethyltransferase, deoxycytidylate 5-hydroxymethyltransferase, methionyl-tRNA formyltransferase, aminomethyltransferase, 3-methyl-2-oxobutanoate hydroxymethyltransferase and UDP-4-amino-4-deoxy-L-arabinose formyltransferase.

[1180] In some embodiments, an enzyme having formaldehyde dehydrogenase activity is used to convert formaldehyde to formate and NADH. In some embodiments, the enzyme having formaldehyde dehydrogenase activity is encoded by an amino acid sequence having at least 70% sequence identity, having at least 80% sequence identity, or having at least 90% sequence identity to a formaldehyde dehydrogenase selected from Saccharomyces cerevisiae ALD2, Saccharomyces cerevisiae ALD3, Homo sapiens ALDH3A2, and Homo sapiens ALDH9A1. In some embodiments, the one or more nucleic acid molecule encoding an enzyme having formaldehyde dehydrogenase activity comprises an amino acid sequence selected from UniProt ID P47771, UniProt ID P54114, UniProt ID P51648 and UniProt ID P49189. In a further embodiment, the one or more nucleic acid molecule encoding an enzyme having formaldehyde dehydrogenase activity is encoded by a nucleic acid sequence selected from Gene ID 855206, Gene ID 855205, Gene ID 224 and Gene ID 223.

[1181] In some embodiments, an enzyme having formate dehydrogenase activity is used to convert formate to CO₂ and NADH. In some embodiments, the enzyme having formate dehydrogenase activity is encoded by an amino acid sequence having at least 70% sequence identity, having at least 80% sequence identity, or having at least 90% sequence identity to an enzyme having formate dehydrogenase activity selected from the group consisting of E. coli fdhF (chlF, FDH-H), E. coli FDH-N, E. coli FDH-O, Candida boidinii FDH1, Corynebacterium glutamicum fdhF, Cupriavidus oxalaticus NAD+-dependent formate dehydrogenase, Gottschalkia acidurici NAD+-dependent formate dehydrogenase, Methylobacterium extorquens Fdh1, Methylosinus trichosporium formate dehydrogenase, and Moraxella sp. NAD+-dependent formate dehydrogenase fdh. In some embodiments, the one or more nucleic acid molecule encoding an enzyme or subunit of an enzyme associated with formate dehydrogenase activity comprises an amino acid sequence selected from UniProt ID P07658, UniProt ID P0AEK7, UniProt ID P0AAJ3, UniProt ID P24183, UniProt ID P32176, UniProt ID P0AAJ5, UniProt ID P0AEL0, UniProt ID O13437, UniProt ID Q8NSY6, UniProt ID Q8KTI7, UniProt ID Q8KTI8, and UniProt ID 008375. In a further embodiment, the one or more nucleic acid molecule encoding an enzyme or subunit of an enzyme associated with formate dehydrogenase activity comprises a nucleic acid sequence selected from Gene ID 948584, Gene ID 946038, Gene ID 948794, Gene ID 946035, Gene ID 948394, Gene ID 948395, Gene ID 948383, GenBank accession AJ011046.2, Gene ID 1021531, GenBank accession AF489516, and GenBank accession Y13245.1.

[1182] In some embodiments, one or more proteins of the glycince cleavage system are used to produce glycine from M-THF, CO₂, NH₃ and NADH. In some embodiments, the proteins of the glycine cleavage system comprise: i) P-protein (a pyridoxal phosphate-containing protein) or glycine decarboxylase (EC 1.4.4.2), ii) T-protein or aminomethyl-transferase (EC 2.1.2.10), iii) L-protein or dihydrolipoamide dehydrogenase (EC1.8.1.4), and iv) a carrier protein called H-protein (a lipoic acid-containing protein). In some embodiments, the enzyme having glycine decarboxylase activity is encoded by an amino acid sequence having at least 70% sequence identity, having at least 80% sequence identity, or having at least 90% sequence identity to E. coli gcvP. In some embodiments, the one or more nucleic acid molecule encoding an enzyme having glycine decarboxylase activity comprises an amino acid sequence set forth in UniProt ID P33195. In a further embodiment, the one or more nucleic acid molecule encoding an enzyme having glycine decarboxylase activity comprises a nucleic acid sequence set forth in Gene ID 947394. In some embodiments, the enzyme having aminomethyltransferase activity is encoded by an amino acid sequence having at least 70% sequence identity, having at least 80% sequence identity, or having at least 90% sequence identity to E. coli gcvT. In some embodiments, the one or more nucleic acid molecule encoding an enzyme having aminomethyltransferase activity comprises an amino acid sequence set forth in UniProt ID P27248. In a further embodiment, the one or more nucleic acid molecule encoding an enzyme having aminomethyltransferase activity comprises a nucleic acid sequence set forth in Gene ID 947390. In some embodiments, the enzyme having dihydrolipoamide dehydrogenase activity is encoded by an amino acid sequence having at least 70% sequence identity, having at least 80% sequence identity, or having at least 90% sequence identity to E. coli lpd (lpdA, E3 subunit). In some embodiments, the one or more nucleic acid molecule encoding an enzyme having dihydrolipoamide dehydrogenase activity comprises an amino acid sequence set forth in UniProt ID P0A9P0. In a further embodiment, the one or more nucleic acid molecule encoding an enzyme having dihydrolipoamide dehydrogenase activity comprises a nucleic acid sequence set forth in Gene ID 944854. In some embodiments, the H-protein is encoded by an amino acid sequence having at least 70% sequence identity, having at least 80% sequence identity, or having at least 90% sequence identity to E. coli gcvH. In some embodiments, the one or more nucleic acid molecule encoding an H-protein comprises an amino acid sequence set forth in UniProt ID P0A6T9. In a further embodiment, the one or more nucleic acid molecule encoding an H-protein is encoded by a nucleic acid sequence set forth in Gene ID 947393.

[1183] In some embodiments, an enzyme having glycolate dehydrogenase activity is used to convert glycolic acid to glyoxylate. In some embodiments, the enzyme having glycolate dehydrogenase activity is encoded by an amino acid sequence having at least 70% sequence identity, having at least 80% sequence identity, or having at least 90% sequence identity to an enzyme having glycolate dehydrogenase activity selected from E. coli glycolate dehydrogenase GLC and Arabidopsis thaliana glycolate dehydrogenase. In some embodiments, the one or more nucleic acid molecule encoding an enzyme or enzyme subunit associated with glycolate dehydrogenase activity comprises an amino acid sequence selected from UniProt ID P0AEP9, UniProt ID P52073, UniProt ID P52074, and UniProt ID Q94AX4. In a further embodiment, the one or more nucleic acid molecule encoding an enzyme or enzyme subunit associated with glycolate dehydrogenase activity comprises a nucleic acid sequence selected from Gene ID 947353, Gene ID 2847718, Gene ID 2847717, and GenBank accession Y13245.1.

[1184] In some embodiments, an enzyme having alanine-glyoxylate aminotransferase activity is used to convert glyoxylate to glycine. In some embodiments, the enzyme having alanine-glyoxylate aminotransferase activity is encoded by an amino acid sequence having at least 70% sequence identity, having at least 80% sequence identity, or having at least 90% sequence identity to an enzyme having alanine-glyoxylate aminotransferase activity selected from Saccharomyces cerevisiae AGX1, Homo sapiens AGXT2, Arabidopsis thaliana AOAT1 and Arabidopsis thaliana AOAT2. In some embodiments, the one or more nucleic acid molecule encoding an enzyme having alanine-glyoxylate aminotransferase activity comprises an amino acid sequence selected from UniProt ID P43567, UniProt ID Q9BYV1, UniProt ID Q9LR30 and UniProt ID Q9S7E9. In a further embodiment, the one or more nucleic acid molecule encoding an enzyme having alanine-glyoxylate aminotransferase activity comprises a nucleic acid sequence selected from Gene ID 850514, Gene ID 64902, TAIR accession AT1G23310 and TAIR accession AT1G70580.

[1185] In some embodiments, an enzyme having alanine transaminase activity is used to reconstitute alanine from pyruvate and glutamate. In some embodiments, the enzyme having alanine transaminase activity is encoded by an amino acid sequence having at least 70% sequence identity, having at least 80% sequence identity, or having at least 90% sequence identity to an enzyme having alanine transaminase activity selected from E. coli glutamate-pyruvate aminotransferase alaA, E. coli glutamate-pyruvate aminotransferase alaB, E. coli glutamate-pyruvate aminotransferase alaC, Homo sapiens alanine aminotransferase 1 (GPT), Homo sapiens alanine aminotransferase 2 (GPT2), Arenicola marina alanine transaminase, Arabidopsis thaliana tryptophan aminotransferase TAA1, Arabidopsis thaliana AOAT1, Arabidopsis thaliana AOAT2, Candida maltosa alanine aminotransferase, Clostridium propionicum alanine aminotransferase, Pyrococcus furiosus alanine aminotransferase aat, Megathyrsus maximus alanine transaminase, and Panicum miliaceum alanine transaminase AlaAT-2. In some embodiments, the one or more nucleic acid molecule encoding an enzyme having alanine transaminase activity comprises an amino acid sequence selected from UniProt ID P0A959, UniProt ID P77434, UniProt ID P24298, UniProt ID Q8TD30, UniProt ID Q9S7N2, UniProt ID Q9LR30, UniProt ID Q9S7E9, UniProt ID Q9P9M8, and UniProt ID P34106. In a further embodiment, the one or more nucleic acid molecule encoding an enzyme having alanine transaminase activity comprises a nucleic acid sequence selected from Gene ID 946772, Gene ID 946850, Gene ID 2875, Gene ID 84706, Gene ID 843393, TAIR accession AT1G23310, TAIR accession AT1G70580, GenBank accession AF163769.1 and GenBank accession X69421.1.

[1186] In some embodiments, an enzyme having glutamate dehydrogenase activity is used to reconstitute glutamate from ammonia and 2-oxoglutarate. In some embodiments, the enzyme having glutamate dehydrogenase activity is encoded by an amino acid sequence having at least 70% sequence identity, having at least 80% sequence identity, or having at least 90% sequence identity to an enzyme having glutamate dehydrogenase activity selected from Saccharomyces cerevisiae NAD-dependent glutamate dehydrogenase GDH2, Arabidopsis thaliana NAD-dependent glutamate dehydrogenase GDH2, Arabidopsis thaliana NAD-dependent glutamate dehydrogenase GDH1, Peptoniphilus asaccharolyticus NAD-dependent glutamate dehydrogenase gdhA, Halobacterium salinarum NAD-dependent glutamate dehydrogenase gdhA, Thermotoga maritima glutamate dehydrogenase, Homo sapiens glutamate dehydrogenase 1 (GLUD1), Homo sapiens glutamate dehydrogenase 2 (GLUD2), Bacillus subtilis glutamate dehydrogenase and Solanum lycopersicum glutamate dehydrogenase GDH1. In some embodiments, the one or more nucleic acid molecule encoding an enzyme having glutamate dehydrogenase activity comprises an amino acid sequence selected from UniProt ID P33327, UniProt ID Q38946, UniProt ID Q38946, UniProt ID P28997, UniProt ID P29051, UniProt ID P00367, UniProt ID P49448 and UniProt ID P93541. In a further embodiment, the one or more nucleic acid molecule encoding an enzyme having glutamate dehydrogenase activity is encoded by a nucleic acid sequence selected from Gene ID 461927, TAIR accession AT5G07440, TAIR accession AT5G18170, GenBank accession M76403.1, GenBank accession X63837.1, Gene ID 2746, Gene ID 2747 and GenBank accession U48695.1.

[1187] Production of Monoethanolamine (MEA)

[1188] MEA can be produced via decarboxylation of Ser or transamination of glycolaldehyde.

[1189] In some preferred embodiments, serine decarboxylases are utilized, since they are found naturally, i.e. in choline biosynthesis pathways in plants, and the transamination of a glycolaldehyde intermediate would create a cross talk between the MEG and MEA pathway.

[1190] Alternatively, in another embodiment, MEA may be formed by ethanolamine ammonia lyase (EC 4.3.1.7) from acetaldehyde and ammonia:

[1191] Acetaldehyde+NH₃↔ethanolamine

[1192] In this case, MEA is not formed via the Ser biosynthesis pathway, but rather from acetyl-CoA and its reduction to acetaldehyde by acetaldehyde dehydrogenase. While the redox situation does not change, this pathway yields +1 ATP versus the Ser based pathway. It also avoids the toxic intermediate Ser, but has the toxic and volatile intermediate acetaldehyde.

[1193] In some embodiments, the production of MEG (or glycolic acid) and MEA is very close to the thermodynamic maximum yield potential using the lossless conversion of one or more hexose to one or more pentose-5-phosphate intermediates, followed by the conversion of the one or more pentose-5-phosphate intermediates to one or more pentose-1-phosphate and/or pentose intermediates, and then followed by the co-production of MEG (or glycolic acid) via a C2 pathway and MEA via a C3 pathway from the one or more pentose-1-phosphate and/or pentose intermediates. In some embodiments, the thermodynamic yield potential is 15% better for co-production of MEG (or glycolic acid) and MEA via the pathways disclosed in the present application compared to production of MEA made from glucose by natural or published similar pathways.

[1194] Co-production, Ser pathway: hexose+NH₃->MEG (or glycolic acid)+MEA+0 ATP

[1195] Co-production, acetaldehyde pathway: hexose+NH₃->MEG (or glycolic acid)+MEA+1 ATP

[1196] Y(pathway)=(0.371+0.365) g/g=0.736 g(MEG (or glycolic acid)+MEA)/g(hexose+NH₃), 98% of Y(max)(heat of combustion)=0.749 g/g

[1197] Standard pathway: glucose+2 NH₃->2 MEA+2 NADH+0 ATP

[1198] Y(pathway)=0.570 g(MEA)/g(glucose+2NH₃), 85% of Y(max)(heat of combustion)=0.669 g/g

[1199] In some embodiments, MEG (or glycolic acid) and MEA are co-produced from one or more hexose feedstock by the lossless transformation of the one or more hexose feedstock to one or more pentose-5-phosphate intermediate, followed by a conversion of the one or more pentose-5-phosphate intermediate to one or more pentose and/or pentose-1-phosphate intermediate, followed by a conversion of the one or more pentose and/or pentose-1-phosphate intermediate to MEG (or glycolic acid) and DHAP or pyruvate via a C2 pathway, and a conversion of DHAP or pyruvate to MEA via a C3 pathway.

[1200] In some embodiments, the C2 pathway for production of MEG (or glycolic acid) comprises embodiment [H] and the C3 pathway for production of MEA comprises embodiment [U]. In other embodiments, the C2 pathway for production of MEG (or glycolic acid) comprises embodiment [H] and the C3 pathway for production of MEA comprises embodiment [V]. In further embodiments, the C2 pathway for production of MEG (or glycolic acid) comprises embodiment [H] and the C3 pathway for production of MEA comprises embodiment [W]. In some embodiments, the C2 pathway for production of MEG (or glycolic acid) comprises embodiment [I] and the C3 pathway for production of MEA comprises embodiment [U]. In other embodiments, the C2 pathway for production of MEG (or glycolic acid) comprises embodiment [I] and the C3 pathway for production of MEA comprises embodiment [V]. In further embodiments, the C2 pathway for production of MEG (or glycolic acid) comprises embodiment [I] and the C3 pathway for production of MEA comprises embodiment [W]. In some embodiments, the C2 pathway for production of MEG (or glycolic acid) comprises embodiment [J] and the C3 pathway for production of MEA comprises embodiment [U]. In other embodiments, the C2 pathway for production of MEG (or glycolic acid) comprises embodiment [J] and the C3 pathway for production of MEA comprises embodiment [V]. In other embodiments, the C2 pathway for production of MEG (or glycolic acid) comprises embodiment [J] and the C3 pathway for production of MEA comprises embodiment [W].

[1201] [U] In one embodiment, the application relates to a recombinant microorganism capable of co-producing monoethylene glycol (MEG) (or glycolic acid) and monoethanolamine (MEA), from one or more hexose feedstock and a nitrogen source, wherein the recombinant microorganism from embodiment [A] or from embodiment [B] (and optionally comprising embodiment [C]), and comprising additionally one or more of embodiments [D], [E], [F] and [G], further comprising one or more of embodiments [H], [I], and [J], further expresses one or more of the following from (a) to (i):

[1202] (a) at least one endogenous or exogenous nucleic acid molecule encoding an enzyme having 3-phosphoglycerate dehydrogenase activity that catalyzes the conversion of 3-phosphoglycerate to 3-phosphohydroxypyruvate;

[1203] (b) at least one endogenous or exogenous nucleic acid molecule encoding an enzyme having 3-phosphoglycerate phosphatase activity and/or an enzyme having glycerate 3-kinase activity that catalyzes the conversion of 3-phosphoglycerate to glycerate;

[1204] (c) at least one endogenous or exogenous nucleic acid molecule encoding an enzyme having 2-phosphoglycerate phosphatase activity and/or an enzyme having glycerate 2-kinase activity that catalyzes the conversion of 2-phosphoglycerate to glycerate;

[1205] (d) at least one endogenous or exogenous nucleic acid molecule encoding an enzyme having phosphoserine aminotransferase activity that catalyzes the conversion of 3-phosphohydroxypyruvate from (a) to phospho-L-serine;

[1206] (e) at least one endogenous or exogenous nucleic acid molecule encoding an enzyme having 3-phosphohydroxypyruvate phosphatase activity that catalyzes the conversion of 3-phosphohydroxypyruvate from (a) to hydroxypyruvate;

[1207] (f) at least one endogenous or exogenous nucleic acid molecule encoding an enzyme having phosphoserine phosphatase activity that catalyzes the conversion of phospho-L-serine from (d) to L-serine;

[1208] (g) at least one endogenous or exogenous nucleic acid molecule encoding an enzyme having hydroxypyruvate reductase activity that catalyzes the conversion of glycerate from (b) and/or (c) to hydroxypyruvate;

[1209] (h) at least one endogenous or exogenous nucleic acid molecule encoding an enzyme having serine-pyruvate aminotransferase activity that catalyzes the conversion of hydroxypyruvate from (e) and/or (g) to L-serine;

[1210] (i) at least one endogenous or exogenous nucleic acid molecule encoding an enzyme having serine decarboxylase activity that catalyzes the conversion of L-serine from (f) and/or (h) to MEA;

wherein the produced intermediate DHAP from embodiments [H] and/or [I] and/or pyruvate from embodiment [J] is converted to 3-phosphoglycerate and/or 2-phosphoglycerate through endogenous glycolysis or gluconeogenesis in the microorganism, and wherein MEG (or glycolic acid) and MEA are co-produced.

[1211] [V] In one embodiment, the application relates to a recombinant microorganism capable of co-producing monoethylene glycol (MEG) (or glycolic acid) and monoethanolamine (MEA) from one or more hexose feedstock and a nitrogen source, wherein the recombinant microorganism from embodiment [A] or from embodiment [B] (and optionally comprising embodiment [C]), and comprising additionally one or more of embodiments [D], [E], [F], and [G], further comprising one or more of embodiments [H], [I], and [J], further expresses one or more of the following from (a) to (f):

[1212] (a) at least one endogenous or exogenous nucleic acid molecule encoding an enzyme having 2-phosphoglycerate phosphatase activity and/or an enzyme having glycerate-2-kinase activity that catalyzes the conversion of 2-phosphoglycerate to glycerate;

[1213] (b) at least one endogenous or exogenous nucleic acid molecule encoding an enzyme having 3-phosphoglycerate phosphatase activity and/or an enzyme having glycerate-3-kinase activity that catalyzes the conversion of 3-phosphoglycerate to glycerate;

[1214] (c) at least one endogenous or exogenous nucleic acid molecule encoding an enzyme having hydroxypyruvate reductase activity that catalyzes the conversion of glycerate from (a) and/or (b) to hydroxypyruvate;

[1215] (d) at least one endogenous or exogenous nucleic acid molecule encoding an enzyme having serine-pyruvate aminotransferase or serine oxidoreductase (deaminating) activity that catalyzes the conversion of L-serine to hydroxypyruvate;

[1216] (e) at least one endogenous or exogenous nucleic acid molecule encoding an enzyme having hydroxypyruvate decarboxylase activity that catalyzes the conversion of hydroxypyruvate from (c) and/or (d) to glycolaldehyde;

[1217] (f) at least one endogenous or exogenous nucleic acid molecule encoding an enzyme having transaminase activity that catalyzes the conversion of glycolaldehyde from (e) to MEA;

wherein the produced intermediate DHAP from embodiments [H] and/or [I] and/or pyruvate from embodiment [J] is converted to 3-phosphoglycerate and/or 2-phosphoglycerate through endogenous glycolysis or gluconeogenesis in the microorganism, and wherein MEG (or glycolic acid) and MEA are co-produced.

[1218] [W] In one embodiment, the application relates to a recombinant microorganism capable of co-producing monoethylene glycol (MEG) (or glycolic acid) and monoethanolamine (MEA) from one or more hexose feedstock and a nitrogen source, wherein the recombinant microorganism from embodiment [A] or from embodiment [B] (and optionally comprising embodiment [C]), and comprising additionally one or more of embodiments [D], [E], [F], and [G], further comprising one or more of embodiments [H], [I], and [J], further expresses one or more of the following from (a) to (b):

[1219] (a) at least one endogenous or exogenous nucleic acid molecule encoding an enzyme having acetaldehyde dehydrogenase activity that catalyzes the conversion of acetyl-CoA to acetaldehyde;

[1220] (b) at least one endogenous or exogenous nucleic acid molecule encoding an enzyme having ethanolamine ammonia lyase activity that catalyzes the conversion of acetaldehyde and ammonia to MEA;

wherein the produced intermediate DHAP from embodiments [H] and/or [I] and/or pyruvate from embodiment [J] is converted to acetyl-CoA through endogenous glycolysis in the microorganism, and wherein MEG (or glycolic acid) and MEA are co-produced.

[1221] In some embodiments, an enzyme having acetaldehyde dehydrogenase activity is used to reduce acetyl-CoA to acetaldehyde. In some embodiments, the enzyme having acetaldehyde dehydrogenase activity is encoded by an amino acid sequence having at least 70% sequence identity, having at least 80% sequence identity, or having at least 90% sequence identity to an enzyme having acetaldehyde dehydrogenase activity selected from E. coli mhpF, E. coli AdhE, Chlamydomonas reinhardtii ADH1, Leuconostoc mesenteroides CoA-dependent acetaldehyde dehydrogenase, Pelobacter acetylenicus acetaldehyde dehydrogenase, Pseudomonas sp. dmpF, Pseudomonas putida acylating aldehyde dehydrogenase todl, Pseudomonas putida acetaldehyde dehydrogenase cmtH and Clostridium acetobutylicum alcohol/aldehyde dehydrogenase AdhE. In some embodiments, the one or more nucleic acid molecule encoding an enzyme having acetaldehyde dehydrogenase activity comprises an amino acid sequence selected from UniProt ID P77580, UniProt P0A9Q7, UniProt ID A8JI07, UniProt ID Q52060, UniProt ID Q51949 and UniProt ID P33744. In a further embodiment, the one or more nucleic acid molecule encoding an enzyme having acetaldehyde dehydrogenase activity comprises a nucleic acid sequence selected from Gene ID 945008, Gene ID 945837, Gene ID 5729132, GenBank accession X60835.1, GenBank accession U09250.1 and Gene ID 1116167.

[1222] In some embodiments, an enzyme having ethanolamine ammonia lyase activity is used to convert acetaldehyde and ammonia to MEA. In some embodiments, the enzyme having ethanolamine ammonia lyase activity is encoded by an amino acid sequence having at least 70% sequence identity, having at least 80% sequence identity, or having at least 90% sequence identity to an E. coli ethanolamine ammonia lyase. In some embodiments, the one or more nucleic acid molecule encoding an ethanolamine ammonia lyase subunit comprises an amino acid sequence selected from UniProt ID P0AEJ6 and UniProt ID P19636. In a further embodiment, the one or more nucleic acid molecule encoding an ethanolamine ammonia lyase subunit is encoded by a nucleic acid sequence selected from Gene ID 946924 and Gene ID 946925.

[1223] Production of Ethylenediamine (EDA)

[1224] EDA can be produced by any of the pathways A through E described in WO 2014/049382, which is herein incorporated in its entirety (FIG. 11).

[1225] In some embodiments, MEG (or glycolic acid) and EDA are co-produced from one or more hexose feedstock by the lossless transformation of the one or more hexose feedstock to one or more pentose-5-phosphate intermediate, followed by a conversion of the one or more pentose-5-phosphate intermediate to one or more pentose and/or pentose-1-phosphate intermediate, followed by a conversion of the one or more pentose and/or pentose-1-phosphate intermediate to MEG (or glycolic acid) and DHAP or pyruvate via a C2 pathway, and a conversion of DHAP or pyruvate to EDA via a C3 pathway.

[1226] In some embodiments, the C2 pathway for production of MEG (or glycolic acid) comprises embodiment [H] and the C3 pathway for production of EDA comprises embodiment [X]. In other embodiments, the C2 pathway for production of MEG (or glycolic acid) comprises embodiment [H] and the C3 pathway for production of EDA comprises embodiment [Y]. In further embodiments, the C2 pathway for production of MEG (or glycolic acid) comprises embodiment [H] and the C3 pathway for production of EDA comprises embodiment [Z]. In yet further embodiments, the C2 pathway for production of MEG (or glycolic acid) comprises embodiment [H] and the C3 pathway for production of EDA comprises embodiment [AA]. In other embodiments, the C2 pathway for production of MEG (or glycolic acid) comprises embodiment [H] and the C3 pathway for production of EDA comprises embodiment [BB].

[1227] In some embodiments, the C2 pathway for production of MEG (or glycolic acid) comprises embodiment [I] and the C3 pathway for production of EDA comprises embodiment [X]. In other embodiments, the C2 pathway for production of MEG (or glycolic acid) comprises embodiment [I] and the C3 pathway for production of EDA comprises embodiment [Y]. In further embodiments, the C2 pathway for production of MEG (or glycolic acid) comprises embodiment [I] and the C3 pathway for production of EDA comprises embodiment [Z]. In yet further embodiments, the C2 pathway for production of MEG (or glycolic acid) comprises embodiment [I] and the C3 pathway for production of EDA comprises embodiment [AA]. In other embodiments, the C2 pathway for production of MEG (or glycolic acid) comprises embodiment [I] and the C3 pathway for production of EDA comprises embodiment [BB].

[1228] In some embodiments, the C2 pathway for production of MEG (or glycolic acid) comprises embodiment [J] and the C3 pathway for production of EDA comprises embodiment [X]. In other embodiments, the C2 pathway for production of MEG (or glycolic acid) comprises embodiment [J] and the C3 pathway for production of EDA comprises embodiment [Y]. In other embodiments, the C2 pathway for production of MEG (or glycolic acid) comprises embodiment [J] and the C3 pathway for production of EDA comprises embodiment [Z]. In other embodiments, the C2 pathway for production of MEG (or glycolic acid) comprises embodiment [J] and the C3 pathway for production of EDA comprises embodiment [AA]. In other embodiments, the C2 pathway for production of MEG (or glycolic acid) comprises embodiment [J] and the C3 pathway for production of EDA comprises embodiment [BB].

[1229] [X] In one embodiment, the application relates to a recombinant microorganism capable of co-producing monoethylene glycol (MEG) (or glycolic acid) and ethylenediamine (EDA), from one or more hexose feedstock and a nitrogen source, wherein the recombinant microorganism from embodiment [A] or from embodiment [B] (and optionally comprising embodiment [C]), and comprising additionally one or more of embodiments [D], [E], [F] and [G], further comprising one or more of embodiments [H], [I], and [J], further expresses one or more of the following from (a) to (c):

[1230] (a) at least one endogenous or exogenous nucleic acid molecule encoding an enzyme having serine dehydrogenase activity that catalyzes the conversion of L-serine to 2-aminomalonate semialdehyde;

[1231] (b) at least one endogenous or exogenous nucleic acid molecule encoding an enzyme having 2-aminomalonate semialdehyde decarboxylase activity that catalyzes the conversion of 2-aminomalonate semialdehyde from (a) to aminoacetaldehyde;

[1232] (c) at least one endogenous or exogenous nucleic acid molecule encoding an enzyme having aminoacetaldehyde transaminase activity that catalyzes the conversion of aminoacetaldehyde from (b) to EDA;

wherein 2-aminomalonate semialdehyde may optionally be converted to aminoacetaldehyde by a spontaneous reaction, and wherein MEG (or glycolic acid) and EDA are co-produced.

[1233] According to this aspect of the disclosure, the recombinant microorganism overexpresses at least one of the genes encoding enzymes exhibiting activity of serine dehydrogenase and aminoacetaldehyde transaminase. These genes may be endogenous genes or exogenous genes.

[1234] The first reaction of the conversion of L-serine into 2-aminomalonate semialdehyde is catalysed by a serine dehydrogenase enzyme. This enzyme belongs to the large enzyme family of alcohol dehydrogenases also called aldehyde reductases. Several enzymes are known to exhibit serine dehydrogenase activity. In one embodiment of the disclosure, these enzymes are encoded by genes chosen among a list of genes well known in the art (Chowdhury et al., 1996, Yao et al., 2010, Tchigvintsev et al., 2012, Fujisawa et al., 2003, Hawes et al., 1996 and Lokanath et al., 2005), including but not limited to the genes listed here: mmsB from Pseudomonas putida, from Synechococcus PCC6301 or from Bacillus cereus; hibdh from Pseudomonas putida E23; PA0743 from Pseudomonas aeruginosa; ydfG from Escherichia coli or from Bacillus brevis or from Bacillus subtilis; sdh from Agrobacterium tumefaciens; hibadh from Rattus norvegicus or from Therms thermophilus HB8; yiaY from Escherichia coli.

[1235] In a preferred embodiment of the disclosure, the serine dehydrogenase is encoded by ydfG from Escherichia coli or mmsB from Pseudomonas putida, or yiaY from Escherichia coli. Preferably, these enzymes are optimized by mutating the encoding genes in order to improve their catalytic efficiency of L-serine into 2-aminomalonate semialdehyde.

[1236] In another embodiment of the disclosure the serine dehydrogenase enzyme is obtained by evolving enzymes in order to modify their substrate specificity and/or their catalytic efficiency to obtain an enzyme which exhibits specificity for serine and activity of serine dehydrogenase. These enzymes are selected among the group of enzymes having the same type of catalytic activity on substrates chemically similar to L-serine. Preferably these enzymes may be chosen among 3-hydroxyisobutyrate dehydrogenases and serine dehydrogenases. More preferably they are encoded by genes chosen among a list of genes well known in the art, including but not limited to the genes here: gldA from Escherichia coli or from Leuconostoc citreum or from Symbiobacterium thermophilum; yqhE from Escherichia coli; yafB from Escherichia coli; alr from Leishmania donovani; sakR1 from Synechococcus sp.; yhdN from Bacillus subtilis; ytbE from Bacillus subtilis; AKR4C9 from Arabidopsis thaliana; fucO from Escherichia coli. Any polypeptide having at least 90% sequence identity to any of the polypeptides encoded by these genes may be used.

[1237] Evolution of these enzymes is carried out by means and methods well known by one skilled in the art in order to obtain enzyme having improved specificity for the substrate L-serine and/or enabling to convert it into 2-aminomalonate semialdehyde with an improved activity. The selection of the evolved enzymes is performed by expressing the evolved enzymes in the microorganism of the disclosure or in vitro with L-serine as substrate and by detecting the product 2-aminomalonate semialdehyde.

[1238] The second reaction of the conversion of 2-aminomalonate semialdehyde into aminoacetaldehyde is performed spontaneously in the cell (Fujisawa et al., 2003). In another embodiment of the disclosure, the second reaction of conversion of 2-aminomalonate semialdehyde into aminoacetaldehyde is catalysed by an enzyme having 2-aminomalonate semialdehyde decarboxylase activity. This enzyme is not encountered naturally. Therefore it is obtained by evolution of known enzyme or by screening metagenomic libraries. The 2-aminomalonate semialdehyde decarboxylase activity is performed with an evolved amino acid decarboxylase or an evolved keto-acid decarboxylase which catalyses the decarboxylation of amino acids or keto acids. Preferably an evolved amino acid decarboxylase is chosen. More preferably the evolved amino acid decarboxylase is chosen among histidine decarboxylase, serine decarboxylase, aspartate decarboxylase, diaminobutanoate decarboxylase, omithine decarboxylase. These enzymes are encoded by genes chosen among a list of genes well known in the art, including but not limited to the genes listed here: sdc from Arabidopsis thaliana; panD from Aquifex aeolicus or from Bacillus subtilis; GAD or GAD2 or GAD3 or GAD4 or GAD5 from Arabidopsis thaliana; GAD or GAD2 or OAZ1 or ODC1 from Bos Taurus; gadA or gadB or panD or speC or speF from Escherichia coli; SCC105.13 from Streptomyces coelicolor; gadB from Mannheimia succiniciproducens; bdb from Haloferax volcanii; odcl from Lactobacillus sp.; kivD from Lactococcus lactis subsp. Lactis; kdcA from Lactococcus lactis; OAZ1 or ODC1 from Bos Taurus; speC or speF from Escherichia coli; SPE1 from Saccharomyces cerevisiae. Any polypeptide having at least 90% sequence identity to any of the polypeptides encoded by these genes may be used. Preferably, the sdc gene from Arabidopsis thaliana is used for obtaining the 2-aminomalonate semialdehyde decarboxylase activity.

[1239] Evolution of these enzymes is carried out by means and methods well known by one skilled in the art in order to obtain enzymes having specificity for the substrate 2-aminomalonate semialdehyde and enabling to convert it into aminoacetaldehyde. The selection of the evolved enzyme is performed by expressing the evolved enzyme in the microorganism of the invention or in vitro with 2-aminomalonate semialdehyde as substrate and by quantifying the product aminoacetaldehyde.

[1240] The last reaction of the conversion of aminoacetaldehyde into ethylenediamine is catalysed by an aminoacetaldehyde transaminase. This enzyme is not encountered naturally. Therefore it is obtained by evolution of a known enzyme or by screening metagenomic libraries. In one embodiment of the invention, the aminoacetaldehyde transaminase activity is performed with an evolved transaminase or aminotransferase which catalyses the exchange of an amino group of one molecule with an oxo group on another molecule. Preferably, the evolved aminotransferase is chosen among phosphoserine aminotransferase or aspartate aminotransferase or glutamate aminotransferase. More preferably, the evolved aminotransferase is chosen among aminotransferases using glutamate as amino group donor. These enzymes are encoded by genes chosen among a list of genes well known in the art, including but not limited to the genes listed here: serC from Escherichia coli or from Bacillus subtilis or from Corynebacterium glutamicum; GOT1 from Sus scrofa; patA from Escherichia coli; ygjG from Brucella canis; rocD from Rhizobium NGR 234 or from Streptomyces avermitilis; SCO1284 from Streptomyces coelicolor; AGT or AGT2 or AGT3 or GGT1 from Arabidopsis thaliana; AGXT from Bos taurus. Any polypeptide having at least 90% sequence identity to any of the polypeptides encoded by these genes may be used. Preferably, genes serC from Escherichia coli or GOT1 from Sus scrofa are used for obtaining the aminoacetaldehyde transaminase activity.

[1241] Evolution of these enzymes is carried out by means and methods well known by one skilled in the art in order to obtain enzymes having specificity for the substrate aminoacetaldehyde and enabling to convert it into ethylenediamine. The selection of the evolved enzyme is done by expressing the evolved enzyme in the microorganism of the invention or in vitro with aminoacetaldehyde as substrate and by detecting the product ethylenediamine.

[1242] In another embodiment of the disclosure, aminoacetaldehyde transaminase enzymes can be isolated from strains growing on ethylenediamine as sole carbon and nitrogen source. For this purpose enrichment cultures from environmental samples on ethylenediamine are cultivated on minimal medium with ethylenediamine as sole nitrogen and carbon source. Metagenomic libraries are generated from these cultures and screened for the presence of aminoacetaldehyde transaminase enzymes. This approach allows isolating the gene corresponding to the enzymatic activity and is well-known to the expert in the field.

[1243] According to a specific aspect of the disclosure, the microorganism from embodiment [X] is engineered to overexpress at least one of the following genes: ydfG gene or mmsB gene or yiaY gene, encoding for the serine dehydrogenase; and/or an evolved serC gene or GOT1 gene, encoding for the aminoacetaldehyde transaminase activity.

[1244] [Y] In one embodiment, the application relates to a recombinant microorganism capable of co-producing monoethylene glycol (MEG) (or glycolic acid) and ethylenediamine (EDA), from one or more hexose feedstock and a nitrogen source, wherein the recombinant microorganism from embodiment [A] or from embodiment [B] (and optionally comprising embodiment [C]), and comprising additionally one or more of embodiments [D], [E], [F] and [G], further comprising one or more of embodiments [H], [I], and [J], further expresses one or more of the following from (a) to (c):

[1245] (a) at least one endogenous or exogenous nucleic acid molecule encoding an enzyme having serine dehydrogenase activity that catalyzes the conversion of L-serine to 2-aminomalonate semialdehyde;

[1246] (b) at least one endogenous or exogenous nucleic acid molecule encoding an enzyme having 2-aminomalonate semialdehyde transaminase activity that catalyzes the conversion of 2-aminomalonate semialdehyde from (a) to 2,3-diaminopropanoate;

[1247] (c) at least one endogenous or exogenous nucleic acid molecule encoding an enzyme having 2,3-diaminopropanoate decarboxylase activity that catalyzes the conversion of 2,3-diaminopropanoate from (b) to EDA;

wherein MEG (or glycolic acid) and EDA are co-produced.

[1248] According to this aspect of the disclosure, the recombinant microorganism overexpresses at least one of the genes encoding enzymes exhibiting activity of serine dehydrogenase, 2-aminomalonate semialdehyde transaminase and 2,3-diaminopropanoate decarboxylase. These genes may be endogenous genes or exogenous genes.

[1249] The first reaction of conversion of L-serine into 2-aminomalonate semialdehyde is catalysed by a serine dehydrogenase enzyme. This enzyme belongs to the large enzyme family of alcohol dehydrogenases also called aldehyde reductases. Several enzymes are known to exhibit serine dehydrogenase activity. In one embodiment of the disclosure, the serine dehydrogenase is chosen among these known enzymes. These enzymes are encoded by genes chosen among a list of genes well known in the art (Chowdhury et al., 1996, Yao et al., 2010, Tchigvintsev et al., 2012, Fujisawa et al., 2003, Hawes et al., 1996 and Lokanath et al., 2005), including but not limited to the genes listed here: mmsB from Pseudomonas putida, from Synechococcus PCC6301 or from Bacillus cereus; hibdh from Pseudomonas putida E23; PA0743 from Pseudomonas aeruginosa; ydfG from Escherichia coli or from Bacillus brevis or from Bacillus subtilis; sdh from Agrobacterium tumefaciens; hibadh from Rattus norvegicus or from Therms thermophilus HB8; yiaY from Escherichia coli.

[1250] In a preferred embodiment of the disclosure, the serine dehydrogenase is encoded by ydfG from Escherichia coli or mmsB from Pseudomonas putida, or yiaY from Escherichia coli. Preferably, these enzymes are optimized by mutating the encoding genes in order to improve their catalytic efficiency of L-serine into 2-aminomalonate semialdehyde.

[1251] In another embodiment of the disclosure the serine dehydrogenase enzyme is obtained by evolving enzymes in order to modify their substrate specificity and/or their catalytic efficiency to obtain an enzyme which exhibits specificity for serine and activity of serine dehydrogenase. These enzymes are selected among the group of enzymes having the same type of catalytic activity on substrates chemically similar to L-serine. Preferably these enzymes may be chosen among 3-hydroxyisobutyrate dehydrogenases and serine dehydrogenases. More preferably they are encoded by genes chosen among a list of genes well known in the art, including but not limited to the genes here: gldA from Escherichia coli or from Leuconostoc citreum or from Symbiobacterium thermophilum; yqhE from Escherichia coli; yafB from Escherichia coli; alr from Leishmania donovani; sakR1 from Synechococcus sp.; yhdN from Bacillus subtilis; ytbE from Bacillus subtilis; AKR4C9 from Arabidopsis thaliana; fucO from Escherichia coli. Any polypeptide having at least 90% sequence identity to any of the polypeptides encoded by these genes may be used.

[1252] Evolution of these enzymes is carried out by means and methods well known by one skilled in the art in order to obtain enzyme having improved specificity for the substrate L-serine and/or enabling to convert it into 2-aminomalonate semialdehyde with an improved activity. The selection of the evolved enzymes is performed by expressing the evolved enzymes in the microorganism of the disclosure or in vitro with L-serine as substrate and by detecting the product 2-aminomalonate semialdehyde.

[1253] The second reaction of conversion of 2-aminomalonate semialdehyde into 2,3-diaminopropanoate is catalysed by a 2-aminomalonate semialdehyde transaminase. This enzyme is not encountered naturally. Therefore it is obtained by evolution of a known enzyme or by screening metagenomic libraries. The 2-aminomalonate semialdehyde transaminase activity is performed with an evolved transaminase or aminotransferase which catalyses the exchange of an amino group of one molecule with an oxo group of another molecule. Preferably the evolved aminotransferase is chosen among phosphoserine aminotransferase or aspartate aminotransferase or glutamate aminotransferase. More preferably, the evolved aminotransferase is chosen among aminotransferase using glutamate as amino group donor. These enzymes are encoded by genes chosen among a list of genes well known in the art, including but not limited to the genes listed here: serC from Escherichia coli or from Bacillus subtilis or from Corynebacterium glutamicum; GOT1 from Sus scrota; patA from Escherichia coli; ygjG from Brucella canis; rocD from Rhizobium NGR 234 or from Streptomyces avermitilis; SCO1284 from Streptomyces coelicolor; AGT or AGT2 or AGT3 or GGT1 from Arabidopsis thaliana; AGXT from Bos taurus. Any polypeptide having at least 90% sequence identity to any of the polypeptides encoded by these genes may be used. Preferably, genes serC from Escherichia coli or GOT1 from Sus scrofa are used for obtaining the 2-aminomalonate semialdehyde transaminase activity.

[1254] Evolution of these enzymes is carried out by means and methods well known by the man skilled in the art in order to obtain enzymes having improved specificity for the substrate 2-aminomalonate semialdehyde and/or enabling to convert it into 2,3-diaminopropanoate with an improved activity. The selection of the evolved enzyme is done by expressing the evolved enzyme in the microorganism of the invention or in vitro with 2-aminomalonate semialdehyde as substrate and by quantifying the product 2,3-diaminopropanoate.

[1255] The third reaction of conversion of 2,3-diaminopropanoate into ethylenediamine is catalysed by an enzyme having 2,3-diaminopropanoate decarboxylase activity. This enzyme is not encountered naturally. Therefore it is obtained by evolution of known enzyme or by screening metagenomic libraries. The 2,3-diaminopropanoate decarboxylase activity is performed with an evolved amino acid decarboxylase or an evolved keto-acid decarboxylase which catalyses the decarboxylation of amino acids or keto-acids. Preferably an evolved amino acid decarboxylase is chosen. More preferably the evolved amino acid decarboxylase is chosen among histidine decarboxylase, serine decarboxylase, aspartate decarboxylase, diaminobutanoate decarboxylase, omithine decarboxylase. These enzymes are encoded by genes chosen among a list of genes well known in the art, including but not limited to the genes listed here: sdc from Arabidopsis thaliana; padC or yclB from Bacillus subtilis; ubiD from Campylobacter jejuni or from Escherichia coli; PAD1 or GAD1 or SPE1 from Saccharomyces cerevisiae; panD from Aquifex aeolicus or from Bacillus subtilis; GAD or GAD2 or GAD3 or GAD4 or GAD5 from Arabidopsis thaliana; GAD or GAD2 or OAZ1 or ODC1 from Bos Taurus; gadA or gadB or panD or speC or speF from Escherichia coli; SCC105.13 from Streptomyces coelicolor; gadB from Mannheimia succiniciproducens; bdb from Haloferax volcanii; odcl from Lactobacillus sp.; kivD from Lactococcus lactis subsp. Lactis; kdcA from Lactococcus lactis; OAZ1 or ODC1 from Bos Taurus; speC or speF from Escherichia coli; SPE1 from Saccharomyces cerevisiae. Any polypeptide having at least 90% sequence identity to any of the polypeptides encoded by these genes may be used. Preferably, the sdc gene from Arabidopsis thaliana is used for obtaining the 2,3-diaminopropanoate decarboxylase activity.

[1256] Evolution of these enzymes is carried out by means and methods well known by the man skilled in the art in order to obtain enzymes having improved specificity for the substrate 2,3-diaminopropanoate and/or enabling to convert it into ethylenediamine with an improved activity. The selection of the evolved enzyme is performed by expressing the evolved enzyme in the microorganism of the invention or in vitro with 2,3-diaminopropanoate as substrate and by quantifying the product ethylenediamine. According to a specific aspect of the disclosure, the microorganism from embodiment [Y] is engineered to overexpress: ydfG gene, yiaY gene or mmsB gene, encoding for the serine dehydrogenase; and/or evolved serC gene or GOT1 gene, encoding for 2-aminomalonate semialdehyde transaminase activity; and/or evolved sdc gene from Arabidopsis thaliana, coding for the 2,3-diaminopropanoate decarboxylase.

[1257] [Z] In one embodiment, the application relates to a recombinant microorganism capable of co-producing monoethylene glycol (MEG) (or glycolic acid) and ethylenediamine (EDA), from one or more hexose feedstock and a nitrogen source, wherein the recombinant microorganism from embodiment [A] or from embodiment [B] (and optionally comprising embodiment [C]), and comprising additionally one or more of embodiments [D], [E], [F] and [G], further comprising one or more of embodiments [H], [I], and [J], further expresses one or more of the following from (a) to (c):

[1258] (a) at least one endogenous or exogenous nucleic acid molecule encoding an enzyme having serine decarboxylase activity that catalyzes the conversion of L-serine to ethanolamine;

[1259] (b) at least one endogenous or exogenous nucleic acid molecule encoding an enzyme having ethanolamine dehydrogenase activity that catalyzes the conversion of ethanolamine from (a) to aminoacetaldehyde;

[1260] (c) at least one endogenous or exogenous nucleic acid molecule encoding an enzyme having aminoacetaldehyde transaminase activity that catalyzes the conversion of aminoacetaldehyde from (b) to EDA;

wherein MEG (or glycolic acid) and EDA are co-produced.

[1261] According to this aspect of the disclosure, the recombinant microorganism overexpresses at least one of the genes encoding enzymes exhibiting activity of serine decarboxylase, ethanolamine dehydrogenase and aminoacetaldehyde transaminase. These genes may be endogenous genes or exogenous genes.

[1262] The first reaction of conversion of L-serine into ethanolamine is catalyzed by an enzyme having serine decarboxylase activity. This group of enzymes catalyses the decarboxylation of L-serine into ethanolamine. In a preferred embodiment of the invention, the serine decarboxylase is encoded by sdc from Arabidopsis thaliana (Rontein et al., 2001, WO2007/144346). The conversion of L-serine into ethanolamine by the serine decarboxylase, encoded by sdc from Arabidopsis thaliana, is disclosed in particular in patent application WO2007/144364, which is incorporated by reference herein. Preferably, these enzymes are optimized by mutating the encoding genes in order to improve their conversion efficiency of L-serine into ethanolamine.

[1263] In one embodiment of the disclosure, the serine decarboxylase activity is obtained by evolving enzymes in order to modify their substrate specificity and/or their catalytic efficiency to obtain an enzyme which exhibits specificity for serine and improved activity of serine decarboxylase. These enzymes are selected among the group of enzymes having the same type of catalytic activity on substrates chemically similar to ethanolamine. These enzymes are encoded by genes chosen among a list of genes well known in the art, including but not limited to the genes listed here: GAD1 or SPE1 from Saccharomyces cerevisiae; panD from Aquifex aeolicus or from Bacillus subtilis; GAD or GAD2 or GAD3 or GAD4 or GAD5 from Arabidopsis thaliana; GAD or GAD2 or OAZ1 or ODC1 from Bos Taurus; gadA or gadB or panD or speC or speF from Escherichia coli; SCC105.13 from Streptomyces coelicolor; gadB from Mannheimia succiniciproducens; bdb from Haloferax volcanii; odcl from Lactobacillus sp.; OAZ1 or ODC1 from Bos Taurus; speC or speF from Escherichia coli; SPE1 from Saccharomyces cerevisiae. Any polypeptide having at least 90% sequence identity to any of the polypeptides encoded by those genes may be used.

[1264] Evolution of these enzymes is carried out by means and methods well known by one skilled in the art in order to obtain enzymes having improved specificity for the substrate L-serine and enabling to convert it into ethanolamine with an improved activity. The selection of the evolved enzyme is performed by expressing the evolved enzyme in the microorganism of the invention or in vitro with L-serine as substrate and by quantifying the product ethanolamine.

[1265] The second reaction of conversion of ethanolamine into aminoacetaldehyde is catalysed by an ethanolamine dehydrogenase enzyme. Natural enzymes having this activity are not disclosed in prior art; however some enzymes have low catalytic activity. Therefore it is advantageous to evolve these enzymes with low catalytic activity towards evolved enzymes with improved activity. Useful enzymes can also be obtained by screening metagenomic libraries.

[1266] In one embodiment of the disclosure, the ethanolamine dehydrogenase activity is obtained by evolving enzymes in order to modify their substrate specificity and/or their catalytic efficiency to obtain an enzyme which exhibits specificity for ethanolamine and activity of ethanolamine dehydrogenase. These enzymes are selected among the group of enzymes having the same type of catalytic activity on substrates chemically similar to ethanolamine. These enzymes are encoded by genes chosen among a list of genes well known in the art, including but not limited to the genes listed here: mmsB from Pseudomonas putida, or from Synechococcus PCC6301, or from Bacillus cereus; hibdh from Pseudomonas putida E23; PA0743 from Pseudomonas aeruginosa; ydfG from Escherichia coli or from Bacillus brevis or from Bacillus subtilis; sdh from Agrobacterium tumefaciens; hibadh from Rattus norvegicus or from Therms thermophilus HB8; gldA from Escherichia coli or from Leuconostoc citreum or from Symbiobacterium thermophilum; yqhE from Escherichia coli; yafB from Escherichia coli; aladh from Enterobacter aerogenes; alr from Leishmania donovani; sakR1 from Synechococcus sp.; yhdN from Bacillus subtilis; ytbE from Bacillus subtilis; yiaY from Escherichia coli; AKR4C9 from Arabidopsis thaliana; fucO from Escherichia coli. Any polypeptide having at least 90% sequence identity to any of the polypeptides encoded by these genes may be used. Preferably genes fucO from Escherichia coli or yiaY from Escherichia coli are used for obtaining the ethanolamine dehydrogenase activity.

[1267] Evolution of these enzymes is carried out by means and methods well known by one skilled in the art in order to obtain enzymes having improved specificity for the substrate ethanolamine and/or enabling to convert it into aminoacetaldehyde with an improved activity. The selection of evolved enzymes is done by expressing the evolved enzymes in the microorganism of the invention or in vitro with ethanolamine as substrate and by quantifying the product aminoacetaldehyde.

[1268] The last reaction of conversion of aminoacetaldehyde into ethylenediamine is catalysed by an aminoacetaldehyde transaminase. This enzyme is not encountered naturally. Therefore it is obtained by evolution of known enzyme or by screening metagenomic libraries. In one embodiment of the disclosure, the aminoacetaldehyde transaminase activity is performed with an evolved transaminase or aminotransferase which catalyses the exchange of an amino group of one molecule with an oxo group on another molecule. Preferably, the evolved aminotransferase is chosen among phosphoserine aminotransferase or aspartate aminotransferase or glutamate aminotransferase. More preferably the evolved aminotransferase is chosen among aminotransferase using glutamate as amino group donor. These enzymes are encoded by genes chosen among a list of genes well known in the art, including but not limited to the genes listed here: serC from Escherichia coli or from Bacillus subtilis or from Corynebacterium glutamicum; GOT1 from Sus scrofa; patA from Escherichia coli; ygjG from Brucella canis; rocD from Rhizobium NGR 234 or from Streptomyces avermitilis; SCO1284 from Streptomyces coelicolor; AGT or AGT2 or AGT3 or GGT1 from Arabidopsis thaliana; AGXT from Bos taurus. Any polypeptide having at least 90% sequence identity to any of the polypeptides encoded by these genes may be used. Preferably, genes serC from Escherichia coli or GOT1 from Sus scrofa are used.

[1269] Evolution of these enzymes is carried out by means and methods well known by one skilled in the art in order to obtain enzymes having improved specificity for the substrate aminoacetaldehyde and/or enabling to convert it into ethylenediamine with an improved activity. The selection of the evolved enzyme is done by expressing the evolved enzyme in the microorganism of the invention or in vitro with aminoacetaldehyde as substrate and by detecting the product ethylenediamine.

[1270] In another embodiment of the disclosure, aminoacetaldehyde transaminase enzymes can be isolated from strains growing on ethylenediamine as sole carbon and nitrogen source. For this purpose enrichment cultures from environmental samples on ethylenediamine are cultivated on minimal medium with ethylenediamine as sole nitrogen and carbon source. Metagenomic libraries are generated from these cultures and screened for the presence of aminoacetaldehyde transaminase enzymes. This approach allows isolating the gene corresponding to the enzymatic activity and is well-known to the expert in the field.

[1271] According to a specific aspect of the disclosure, the microorganism from embodiment [z] is engineered to overexpress: an sdc gene from Arabidopsis thaliana, encoding a serine decarboxylase; and/or fucO or yiaY genes from Escherichia coli, encoding for the ethanolamine dehydrogenase activity; and/or an evolved serC gene or GOT1 gene, encoding for aminoacetaldehyde transaminase activity.

[1272] [AA] In one embodiment, the application relates to a recombinant microorganism capable of co-producing monoethylene glycol (MEG) (or glycolic acid) and ethylenediamine (EDA), from one or more hexose feedstock and a nitrogen source, wherein the recombinant microorganism from embodiment [A] or from embodiment [B] (and optionally comprising embodiment [C]), and comprising additionally one or more of embodiments [D], [E], [F] and [G], further comprising one or more of embodiments [H], [I], and [J], further expresses one or more of the following from (a) to (c):

[1273] (a) at least one endogenous or exogenous nucleic acid molecule encoding an enzyme having serine hydroxymethyltransferase activity that catalyzes the conversion of L-serine to glycine;

[1274] (b) at least one endogenous or exogenous nucleic acid molecule encoding an enzyme having aldehyde oxidase activity that catalyzes the conversion of glycine from (a) to aminoacetaldehyde;

[1275] (c) at least one endogenous or exogenous nucleic acid molecule encoding an enzyme having aminoacetaldehyde transaminase activity that catalyzes the conversion of aminoacetaldehyde from (b) to EDA;

wherein MEG (or glycolic acid) and EDA are co-produced.

[1276] Preferably gene glyA from Escherichia coli is used for obtaining the serine hydroxymethyltransferase activity.

[1277] The aldehyde oxidase enzyme is obtained by evolving enzymes in order to modify their substrate specificity and/or their catalytic efficiency to obtain an enzyme which exhibits specificity for glycine and activity of aldehyde oxidase. These enzymes are selected among the group of enzymes having the same type of catalytic activity on substrates chemically similar to glycine. These enzymes are encoded by genes chosen among a list of genes well known in the art, including but not limited to the genes listed here: aldH1 from Aquifex aeolicus; dhaS from Anoxybacillus flavithermus; Aldh from Apis mellifera; aldX, aldY, dhaS, ycbD, yfmT or ywdH from Bacillus subtilis; prr from Escherichia coli; ALD2, ALD3, ALD4, ALD5, ALD6 from Saccharomyces cerevisiae; betB from Roseobacter denitrificans; AAur 0650 from Arthrobacter aurescens. Any polypeptide having at least 90% sequence identity to any of the polypeptides encoded by these genes may be used.

[1278] Conversion of aminoacetaldehyde into ethylenediamine by an enzyme having aminoacetaldehyde transaminase activity. This enzyme is obtained by evolving enzymes in order to modify their substrate specificity and/or their catalytic efficiency to obtain an enzyme which exhibits specificity for aminoacetaldehyde and activity of transaminase. These enzymes are selected among the group of enzymes having the same type of catalytic activity on substrates chemically similar to aminoacetaldehyde. These enzymes are encoded by genes chosen among a list of genes well known in the art, including but not limited to the genes listed here: serC from Escherichia coli or from Bacillus subtilis or from Corynebacterium glutamicum; GOT1 from Sus scrota; patA from Escherichia coli; ygjG from Brucella canis; rocD from Rhizobium NGR 234 or from Streptomyces avermitilis; SCO1284 from Streptomyces coelicolor; AGT or AGT2 or AGT3 or GGT1 from Arabidopsis thaliana; AGXT from Bos taurus. Any polypeptide having at least 90% sequence identity to any of the polypeptides encoded by these genes may be used.

[1279] According to a specific aspect of the disclosure, the microorganism from embodiment [AA] is engineered to overexpress an evolved serC gene or GOT1 gene, encoding for aminoacetaldehyde transaminase activity.

[1280] [BB] In one embodiment, the application relates to a recombinant microorganism capable of co-producing monoethylene glycol (MEG) (or glycolic acid) and ethylenediamine (EDA), from one or more hexose feedstock and a nitrogen source, wherein the recombinant microorganism from embodiment [A] or from embodiment [B] (and optionally comprising embodiment [C]), and comprising additionally one or more of embodiments [D], [E], [F] and [G], further comprising one or more of embodiments [H], [I], and [J], further expresses one or more of the following from (a) to (e):

[1281] (a) at least one endogenous or exogenous nucleic acid molecule encoding an enzyme having an amino acid N-acetyl transferase activity or O-acetyl transferase activity that catalyzes the conversion of L-serine to N-acetylserine;

[1282] (b) at least one endogenous or exogenous nucleic acid molecule encoding an enzyme having N-acetylserine dehydrogenase activity that catalyzes the conversion of N-acetylserine from (a) to N-acetylmalonate semialdehyde;

[1283] (c) at least one endogenous or exogenous nucleic acid molecule encoding an enzyme having transaminase activity that catalyzes the conversion of N-acetylmalonate semialdehyde from (b) to acetylaminopropanoate;

[1284] (d) at least one endogenous or exogenous nucleic acid molecule encoding an enzyme having deacetylase activity that catalyzes the conversion of acetylaminopropanoate from (c) to 2,3-diaminopropanoate;

[1285] (e) at least one endogenous or exogenous nucleic acid molecule encoding an enzyme having 2,3-diaminopropanoate decarboxylase activity that catalyzes the conversion of 2,3-diaminopropanoate from (d) to EDA;

wherein MEG (or glycolic acid) and EDA are co-produced.

[1286] The first conversion step of embodiment [BB] may be an amino acid N-acetyl transferase activity or O-acetyl transferase activity, since the transformation of 0 to N is spontaneous. Preferably gene argA from Escherichia coli is used for obtaining the amino acid N-acetyl transferase activity.

[1287] An enzyme having N-acetylserine dehydrogenase activity is obtained by evolving enzymes in order to modify their substrate specificity and/or their catalytic efficiency to obtain an enzyme which exhibits specificity for N-acetylserine and activity of N-acetylserine dehydrogenase. These enzymes are selected among the group of enzymes having the same type of catalytic activity on substrates chemically similar to N-acetylserine. These enzymes are encoded by genes chosen among a list of genes well known in the art, including but not limited to the genes listed here: mmsB from Pseudomonas putida, or from Synechococcus PCC6301, or from Bacillus cereus; hibdh from Pseudomonas putida E23; PA0743 from Pseudomonas aeruginosa; ydfG from Escherichia coli or from Bacillus brevis or from Bacillus subtilis; sdh from Agrobacterium tumefaciens; hibadh from Rattus norvegicus or from Therms thermophilus HB8; gldA from Escherichia coli or from Leuconostoc citreum or from Symbiobacterium thermophilum; yqhE from Escherichia coli; yafB from Escherichia coli; aladh from Enterobacter aerogenes; alr from Leishmania donovani; sakR1 from Synechococcus sp.; yhdN from Bacillus subtilis; ytbE from Bacillus subtilis; yiaY from Escherichia coli; AKR4C9 from Arabidopsis thaliana; fucO from Escherichia coli. Any polypeptide having at least 90% sequence identity to any of the polypeptides encoded by these genes may be used.

[1288] An enzyme having a transaminase activity to convert N-acetylmalonate semialdehyde to acetylaminopropanoate may be obtained by evolving enzymes in order to modify their substrate specificity and/or their catalytic efficiency to obtain an enzyme which exhibits specificity for N-acetylmalonate semialdehyde and activity of N-acetylmalonate semialdehyde transaminase. These enzymes are selected among the group of enzymes having the same type of catalytic activity on substrates chemically similar to N-acetylmalonate semialdehyde. These enzymes are encoded by genes chosen among a list of genes well known in the art, including but not limited to the genes listed here: serC from Escherichia coli or from Bacillus subtilis or from Corynebacterium glutamicum; GOT1 from Sus scrota; patA from Escherichia coli; ygjG from Brucella canis; rocD from Rhizobium NGR 234 or from Streptomyces avermitilis; 2SCG18.31c from Streptomyces coelicolor; AGT or AGT2 or AGT3 or GGT1 from Arabidopsis thaliana; AGXT from Bos taurus. Any polypeptide having at least 90% sequence identity to any of the polypeptides encoded by these genes may be used.

[1289] Preferably gene argE from Escherichia coli is used for obtaining the deacetylase activity to convert acetylaminopropanoate into 2,3-diaminopropanoate.

[1290] An enzyme having amino-acid decarboxylase activity or keto acid decarboxylase activity to convert 2,3-diaminopropanoate into ethylenediamine may be obtained by evolving enzymes in order to modify their substrate specificity and/or their catalytic efficiency to obtain an enzyme which exhibits specificity for 2,3-diaminopropanoate and activity of amino acid decarboxylase or keto acid decarboxylase. These enzymes are selected among the group of enzymes having the same type of catalytic activity on substrates chemically similar to 2,3-diaminopropanoate. These enzymes are encoded by gene chosen among a list of genes well known in the art, including but not limited to the genes listed here: sdc from Arabidopsis thaliana; padC or yclB from Bacillus subtilis; ubiD from Campylobacter jejuni or from Escherichia coli; PAD1 or GAD1 or SPE1 from Saccharomyces cerevisiae; panD from Aquifex aeolicus or from Bacillus subtilis; GAD or GAD2 or GAD3 or GAD4 or GAD5 from Arabidopsis thaliana; GAD or GAD2 or OAZ1 or ODC1 from Bos Taurus; gadA or gadB or panD or speC or speF from Escherichia coli; SCC105.13 from Streptomyces coelicolor; gadB from Mannheimia succiniciproducens; bdb from Haloferax volcanii; odcl from Lactobacillus sp.; kivD from Lactococcus lactis subsp. Lactis; kdcA from Lactococcus lactis; OAZ1 or ODC1 from Bos Taurus; speC or speF from Escherichia coli; SPE1 from Saccharomyces cerevisiae. Any polypeptide having at least 90% sequence identity to any of the polypeptides encoded by these genes may be used.

[1291] In a further embodiment of the disclosure, the method is performed with a microorganism wherein serine biosynthesis is optimized. This optimization is disclosed in particular in patent application WO 2007/144346, which is incorporated by reference herein.

[1292] Alternatively, in another embodiment, EDA can be produced by the following process: Ser can be directly aminated to (S)-2,3-diaminopropanoate by serine aminase (EC 2.6.1.-), then decarboxylated to EDA, for instance by an enzyme from the family of L-2,4-diaminobutyrate or ornithine decarboxylases (FIG. 11). However, if such an enzyme with (S)-2,3-diaminopropanoate decarboxylase activity is not specific, it may also act on other amino acids or serine itself

[1293] In some embodiments, EDA can be produced by the following process: the intermediate (S)-2,3-diaminopropanoate may also be produced by direct amination of pyruvate using (S)-2,3-diaminopropanoate ammonia lyase (EC 4.3.1.15) (FIG. 11):

[1294] 2,3-diaminopropanoate+H2O↔2 NH₃+pyruvate

[1295] In some embodiments, the production of MEG (or glycolic acid) and EDA is very close to the thermodynamic maximum yield potential using the lossless conversion of one or more hexose to one or more pentose-5-phosphate intermediates, followed by the conversion of the one or more pentose-5-phosphate intermediates to one or more pentose-1-phosphate and/or pentose intermediates, and then followed by the co-production of MEG (or glycolic acid) via a C2 pathway and EDA via a C3 pathway from the one or more pentose-1-phosphate and/or pentose intermediates. In some embodiments, the thermodynamic yield potential is 14% better for co-production of MEG (or glycolic acid) and EDA via the pathways disclosed in the present application compared to production of EDA made from glucose by natural or published similar pathways.

[1296] Co-production: hexose+2 NH₃->MEG (or glycolic acid)+EDA+0 ATP

[1297] Y(pathway)=(0.337+0.326) g/g=0.663 g(MEG (or glycolic acid)+EDA)/g(hexose+2NH₃), 97% of Y(max)(heat of combustion)=0.687 g/g

[1298] Standard pathway: glucose+4 NH₃->2 EDA+2 NADH+0 ATP

[1299] Y(pathway)=0.484 g(EDA)/g(glucose+4NH₃), 85% of Y(max)(heat of combustion)=0.571 g/g

[1300] In some embodiments, the C2 pathway for production of MEG (or glycolic acid) comprises embodiment [H] and the C3 pathway for production of EDA comprises embodiment [CC]. In other embodiments, the C2 pathway for production of MEG (or glycolic acid) comprises embodiment [H] and the C3 pathway for production of EDA comprises embodiment [DD]. In some embodiments, the C2 pathway for production of MEG (or glycolic acid) comprises embodiment [I] and the C3 pathway for production of EDA comprises embodiment [CC]. In other embodiments, the C2 pathway for production of MEG (or glycolic acid) comprises embodiment [I] and the C3 pathway for production of EDA comprises embodiment [DD]. In some embodiments, the C2 pathway for production of MEG (or glycolic acid) comprises embodiment [J] and the C3 pathway for production of EDA comprises embodiment [CC]. In other embodiments, the C2 pathway for production of MEG (or glycolic acid) comprises embodiment [J] and the C3 pathway for production of EDA comprises embodiment [DD].

[1301] [CC] In one embodiment, the application relates to a recombinant microorganism capable of co-producing monoethylene glycol (MEG) (or glycolic acid) and ethylenediamine (EDA), from one or more hexose feedstock and a nitrogen source, wherein the recombinant microorganism from embodiment [A] or from embodiment [B] (and optionally comprising embodiment [C]), and comprising additionally one or more of embodiments [D], [E], [F] and [G], further comprising one or more of embodiments [H], [I], and [J], further expresses one or more of the following from (a) to (b):

[1302] (a) at least one endogenous or exogenous nucleic acid molecule encoding an enzyme having a serine aminase activity that catalyzes the conversion of L-serine to (S)-2,3-diaminopropanoate;

[1303] (b) at least one endogenous or exogenous nucleic acid molecule encoding an enzyme having an (S)-2,3-diaminopropanoate decarboxylase activity that catalyzes the conversion of (S)-2,3-diaminopropanoate from (a) to EDA;

[1304] wherein MEG (or glycolic acid) and EDA are co-produced.

[1305] [DD] In one embodiment, the application relates to a recombinant microorganism capable of co-producing monoethylene glycol (MEG) (or glycolic acid) and ethylenediamine (EDA), from one or more hexose feedstock and a nitrogen source, wherein the recombinant microorganism from embodiment [A] or from embodiment [B] (and optionally comprising embodiment [C]), and comprising additionally one or more of embodiments [D], [E], [F] and [G], further comprising one or more of embodiments [H], [I], and [J], further expresses one or more of the following from (a) to (b):

[1306] (a) at least one endogenous or exogenous nucleic acid molecule encoding an enzyme having an (S)-2,3-diaminopropanoate ammonia lyase activity that catalyzes the conversion of pyruvate and ammonium to (S)-2,3-diaminopropanoate;

[1307] (b) at least one endogenous or exogenous nucleic acid molecule encoding an enzyme having (S)-2,3-diaminopropanoate decarboxylase activity that catalyzes the conversion of (S)-2,3-diaminopropanoate from (a) to EDA;

wherein pyruvate is produced from endogenous glycolysis, and wherein MEG (or glycolic acid) and EDA are co-produced.

[1308] In some embodiments, an enzyme having 2,3-diaminopropionate ammonia-lyase activity is used to convert pyruvate and ammonium to (S)-2,3-diaminopropanoate. In some embodiments, an enzyme having 2,3-diaminopropionate ammonia-lyase activity is encoded by an amino acid sequence having at least 70% sequence identity, having at least 80% sequence identity, or having at least 90% sequence identity to E. coli 2,3-diaminopropionate ammonia-lyase ygeX. In other embodiments, the enzyme having 2,3-diaminopropionate ammonia-lyase activity is E. coli ygeX. In some embodiments, the one or more nucleic acid molecule encoding an enzyme having 2,3-diaminopropionate ammonia-lyase activity comprises an amino acid sequence set forth in UniProt ID P66899. In further embodiments, the one or more nucleic acid molecule encoding an enzyme having 2,3-diaminopropionate ammonia-lyase activity is encoded by a nucleic acid sequence set forth in Gene ID 947012.

[1309] In one embodiment of any aspect disclosed above, the enzyme having glycolaldehyde reductase activity is encoded by one or more nucleic acid molecules obtained from a microorganism selected from E. coli and S. cerevisiae. In another embodiment, the one or more nucleic acid molecules is selected from gldA, GRE2, GRE3, yqhD, ydjG, fucO, yafB (dkgB), and/or yqhE (dkgA), or homolog thereof. In another embodiment, the one or more nucleic acid molecules is yqhD. In some embodiments, the yqhD comprises a G149E mutation. In a further embodiment, the enzyme having glycolaldehyde reductase activity comprises an amino acid sequence selected from the group consisting of SEQ ID NOs: 13, 15, 17, 20, 23, 25, 28, 30 and 32. In yet a further embodiment, the enzyme having glycolaldehyde reductase activity is encoded by a nucleic acid sequence selected from the group consisting of SEQ ID NOs: 12, 14, 16, 18, 19, 21, 22, 24, 26, 27, 29 and 31.

[1310] In one embodiment of any aspect disclosed above, the enzyme having thiolase or acetyl coenzyme A acetyltransferase activity is encoded by one or more nucleic acid molecules obtained from a microorganism selected from the group consisting of Clostridium sp., Bacillus sp., E. coli, Saccharomyces sp. and Marinobacter sp. In some embodiments, the enzyme having thiolase or acetyl coenzyme A acetyltransferase activity is encoded by one or more nucleic acid molecules obtained from a microorganism selected from the group consisting of Clostridium acetobutylicum, Clostridium thermosaccharolyticum, Bacillus cereus, E. coli, Saccharomyces cerevisiae and Marinobacter hydrocarbonoclasticus. In some embodiments, the one or more nucleic acid molecules is thlA, atoB and/or ERG10, or homolog thereof. In a further embodiment, the enzyme having thiolase or acetyl coenzyme A acetyltransferase activity comprises an amino acid sequence selected from the group consisting of SEQ ID NOs: 35, 37 and 40. In yet a further embodiment, the enzyme having thiolase or acetyl coenzyme A acetyltransferase activity is encoded by a nucleic acid sequence selected from the group consisting of SEQ ID NOs: 33, 34, 36, 38 and 39.

[1311] In one embodiment of any aspect disclosed above, the enzyme having acetyl-CoA:acetoacetate-CoA transferase or acetate:acetoacetyl-CoA hydrolase activity is encoded by one or more nucleic acid molecules obtained from a microorganism selected from Clostridium sp. and E. coli. In another embodiment, the enzyme having acetyl-CoA:acetoacetate-CoA transferase or acetate:acetoacetyl-CoA hydrolase activity is encoded by one or more nucleic acid molecules obtained from E. coli. In some embodiments, the one or more nucleic acid molecules encoding the enzyme having acetyl-CoA:acetoacetate-CoA transferase activity is atoA and/or atoD, or homolog thereof. In another embodiment, the enzyme having acetyl-CoA:acetoacetate-CoA transferase or acetate:acetoacetyl-CoA hydrolase activity is encoded by one or more nucleic acid molecules obtained from Clostridium acetobutylicum. In some embodiments, the one or more nucleic acid molecules encoding the enzyme having acetate:acetoacetyl-CoA hydrolase activity is ctfA and/or ctfB, or homolog thereof. In a further embodiment, the enzyme having acetyl-CoA:acetoacetate-CoA transferase or acetate:acetoacetyl-CoA hydrolase activity comprises an amino acid sequence selected from the group consisting of SEQ ID NOs: 43, 46, 97, 99, 101 and 103. In yet a further embodiment, the enzyme having acetyl-CoA:acetoacetate-CoA transferase or acetate:acetoacetyl-CoA hydrolase activity is encoded by a nucleic acid sequence selected from the group consisting of SEQ ID NOs: 41, 42, 44, 45, 96, 98, 100 and 102.

[1312] In one embodiment of any aspect disclosed above, the enzyme having acetoacetate decarboxylase activity is encoded by one or more nucleic acid molecules obtained from a microorganism selected from the group consisting of Clostridium sp., Bacillus sp., Chromobacterium sp. and Pseudomonas sp. In another embodiment, the enzyme having acetoacetate decarboxylase activity is encoded by one or more nucleic acid molecules obtained from a microorganism selected from the group consisting of Clostridium acetobutylicum, Clostridium beijerinckii, Clostridium cellulolyticum, Bacillus polymyxa, Chromobacterium violaceum and Pseudomonas putida. In some embodiments, the one or more nucleic acid molecules encoding the enzyme having acetoacetate decarboxylase activity is adc, or homolog thereof. In a further embodiment, the enzyme having acetoacetate decarboxylase activity comprises an amino acid sequence selected from the group consisting of SEQ ID NOs: 49 and 52. In yet another embodiment, the enzyme having acetoacetate decarboxylase activity is encoded by a nucleic acid sequence selected from the group consisting of SEQ ID NOs: 47, 48, 50 and 51.

[1313] [EE] In another embodiment, the recombinant microorganism selected from embodiment [H], embodiment [I], and embodiment [J], optionally further comprises one or more modifications selected from the group consisting of:

[1314] (i) a deletion, insertion, or loss of function mutation in a gene encoding a xylose isomerase that catalyzes the conversion of D-xylulose to D-xylose;

[1315] (ii) a deletion, insertion, or loss of function mutation in a gene encoding a glycolaldehyde dehydrogenase that catalyzes the conversion of glycolaldehyde to glycolic acid; and
[1316] (iii) a deletion, insertion, or loss of function mutation in a gene encoding a lactate dehydrogenase that catalyzes the conversion of pyruvate to lactate.

[1317] In some embodiments, a recombinant microorganism producing MEG (or glycolic acid) or, optionally, MEG (or glycolic acid) and one or more co-products, comprises a deletion, insertion, or loss of function mutation in a gene encoding a xylose isomerase to prevent the conversion of D-xylulose to D-xylose and instead shunt the reaction toward conversion of D-xylulose to D-xylulose-1-phosphate, D-xylulose-5-phosphate, or D-ribulose. In some embodiments, the xylose isomerase is from Escherichia coli. In some embodiments, the xylose isomerase is encoded by the xylA gene, or homolog thereof.

[1318] In some embodiments, a recombinant microorganism producing MEG (or glycolic acid) or, optionally, MEG (or glycolic acid) and one or more co-products, comprises a deletion, insertion, or loss of function mutation in a gene encoding a glycolaldehyde dehydrogenase to prevent the production of glycolic acid from glycolaldehyde and instead shunt the reaction toward conversion of glycolaldehyde to MEG. In some embodiments, the glycolaldehyde dehydrogenase is from Escherichia coli. In some embodiments, the glycolaldehyde dehydrogenase is encoded by the aldA gene, or homolog thereof. In some embodiments, the deletion, insertion, or loss of function mutation in a gene encoding a glycolaldehyde dehydrogenase is partial, wherein some glycolaldehyde dehydrogenase function is still present and an amount of glycolic acid is still produced.

[1319] In some embodiments, a recombinant microorganism producing MEG (or glycolic acid) or, optionally, MEG (or glycolic acid) and one or more co-products, comprises a deletion, insertion, or loss of function mutation in a gene encoding a lactate dehydrogenase to prevent the production of lactate from pyruvate and instead shunt the reaction toward production of one or more co-products. In some embodiments, the lactate dehydrogenase is from Escherichia coli. In some embodiments, the lactate dehydrogenase is encoded by the ldhA gene, or homolog thereof.

[1320] Non-limiting combinations of any of the recombinant microorganism and methods embodiments described herein are included as part of this disclosure.

### Recombinant Microorganism

[1321] The disclosure provides microorganisms that can be engineered to express various endogenous or exogenous enzymes.

[1322] In various embodiments described herein, the recombinant microorganism is a eukaryotic microorganism. In some embodiments, the eukaryotic microorganism is a yeast. In exemplary embodiments, the yeast is a member of a genus selected from the group consisting of Yarrowia, Candida, Saccharomyces, Pichia, Hansenula, Kluyveromyces, Issatchenkia, Zygosaccharomyces, Debaryomyces, Schizosaccharomyces, Pachysolen, Cryptococcus, Trichosporon, Rhodotorula, and Myxozyma.

[1323] In some embodiments, the recombinant microorganism is a prokaryotic microorganism. In exemplary embodiments, the prokaryotic microorganism is a member of a genus selected from the group consisting of Escherichia, Clostridium, Zymomonas, Salmonella, Rhodococcus, Pseudomonas, Bacillus, Lactobacillus, Enterococcus, Alcaligenes, Klebsiella, Paenibacillus, Arthrobacter, Corynebacterium, and Brevibacterium.

[1324] In some embodiments, the recombinant microorganism is used to produce monoethylene glycol (MEG) or glycolic acid (GA), or optionally, MEG (or GA) and one or more co-product, disclosed herein.

[1325] Accordingly, in another aspect, the present inventions provide a method of producing MEG or GA, or optionally, MEG (or GA) and one or more co-product, using a recombinant microorganism described herein. In one embodiment, the method comprises cultivating the recombinant microorganism in a culture medium containing a feedstock providing a carbon source until MEG or GA, or optionally, MEG (or GA) and one or more co-product, is produced. In a further embodiment, the MEG (or GA), or optionally, MEG (or GA) and one or more co-product, is recovered. Recovery can be by methods known in the art, such as distillation, membrane-based separation gas stripping, solvent extraction, and expanded bed adsorption.

[1326] In some embodiments, the feedstock comprises a carbon source. In various embodiments described herein, the carbon source may be selected from sugars, glycerol, alcohols, organic acids, alkanes, fatty acids, lignocellulose, proteins, carbon dioxide, and carbon monoxide. In an exemplary embodiment, the carbon source is a sugar. In a further exemplary embodiment, the sugar is glucose or oligomers of glucose thereof. In other embodiments, the oligomers of glucose are selected from fructose, sucrose, starch, cellobiose, maltose, lactose and cellulose.

### Biosynthesis of Xylitol, or Optionally, Xylitol and One or More Co-Product Using a Recombinant Microorganism

[1327] In one aspect, the present disclosure provides a recombinant microorganism comprising one or more biochemical pathway that produces xylitol from one or more hexose feedstock. In one aspect, the present disclosure provides a recombinant microorganism comprising one or more biochemical pathway to produce xylitol from hexose, such as glucose, through the nonoxidative branch of the PPP (i.e., with the use of 1) transketolase, 2) transaldolase, 3) ribulose-5P epimerase and 4) ribose-5P isomerase. In another aspect, the present disclosure preferably provides a recombinant microorganism that has reduced or eliminated activity of at least one enzyme of the oxidative branch of the PPP (i.e., deletion or inactivation of the gene “zwf” in E. coli that codifies glucose-6-phosphate 1-dehydrogenase; and/or the gene “pgl” in E. coli that codifies the 6-phosphogluconolactonase; and/or gene “gnd” in E. coli that codifies the 6-phosphogluconate dehydrogenase, decarboxylating) in order to reduce carbon loss, resulting in an increased yield of xylitol. In one embodiment, one or more co-product is co-produced with xylitol.

[1328] Therefore, in one embodiment, the application relates to a recombinant microorganism comprising one or more biochemical pathway comprising at least one enzyme having an activity that converts one or more hexose feedstock in a lossless conversion to xylitol.

[1329] In one aspect, a microorganism of the present disclosure is capable of converting a hexose or an oligomer comprising a hexose into xylitol as a single end product. In one aspect, a microorganism of the present disclosure is capable of converting a hexose or an oligomer comprising a hexose into xylitol as a co-product.

[1330] In one aspect, a microorganism of the present disclosure is capable of (1) converting a hexose, such as glucose, to D-Ribose-5P and/or (2) D-xylulose-5P and/or D-ribulose-5P. In one aspect, a microorganism of the present disclosure is capable of converting D-Ribose-5P to D-Ribulose-5P via expression of rpiA. In one aspect, a microorganism of the present disclosure is capable of converting D-Ribulose-5P to D-Xylulose-5P via expression of rpe. In one aspect, a microorganism of the present disclosure is capable of converting D-Xylulose-5P to D-Ribulose-5P via expression of rpe. In one aspect, a microorganism of the present disclosure is capable of converting D-Xylulose-5P to D-Xylulose via expression of a phosphatase. In one aspect, the microorganism of the present disclosure comprises a phosphatase that has a high specificity and/or high activity on D-ribulose-5P and/or D-xylulose-5P.

[1331] In one aspect, a microorganism of the present disclosure is capable of converting D-Ribulose-5P to D-Ribulose via expression of a phosphatase. In one aspect, a microorganism of the present disclosure is capable of converting D-Ribulose to D-Xylulose. In one aspect, a microorganism of the present disclosure is capable of converting D-Xylulose to Xylitol via expression of, but not limited to, EC 1.1.1.9. In some aspects, the microorganism of the present disclosure is capable of performing any one or more of the above reactions. In some aspects, the microorganism of the present disclosure is capable of performing any one or more of the reactions described in FIG. 12. In some aspects, the microorganism of the present disclosure does not have arabitol and/or xylitol-5P as an intermediate of the metabolic pathway.

[1332] In one aspect, a microorganism of the present disclosure is capable of (1) converting a hexose, such as glucose, to D-Ribose-5P and/or (2) D-xylulose-5P and/or D-ribulose-5P. In one aspect, a microorganism of the present disclosure is capable of converting D-Ribose-5P to D-Ribulose-5P via expression of rpiA. In one aspect, a microorganism of the present disclosure is capable of converting D-Ribulose-5P to D-Xylulose-5P via expression of rpe. In one aspect, a microorganism of the present disclosure is capable of converting D-Xylulose-5P to D-Ribulose-5P via expression of rpe. In one aspect, a microorganism of the present disclosure is capable of converting (1) D-Ribulose-5P to D-Arabitol-5P via expression of ADP, (2) D-Arabitol-5P to D-Xylulose-1P via expression of ADP, (3) Xylulose-5P to D-Arabitol-1P via expression of ADP, and/or (4) D-Arabitol-1P to D-Ribulose-1P via expression of ADP. In one aspect, a microorganism of the present disclosure is capable of converting D-Ribulose-1P into D-Ribulose via expression of, but not limited to, EC 3.1.3.- and/or EC 2.7.1.17. In one aspect, a microorganism of the present disclosure is capable of converting D-Ribulose into D-Xylulose via expression of, but not limited to, EC 5.1.3.30 and/or EC 5.1.3.31. In one aspect, a microorganism of the present disclosure is capable of converting D-Xylulose-1P into D-Xylulose via expression of, but not limited to, EC 3.1.3.- and/or EC 2.7.1.17. In one aspect, a microorganism of the present disclosure is capable of converting D-Xylulose to Xylitol via expression of, but not limited to, EC 1.1.1.9. In some aspects, the microorganism of the present disclosure is capable of performing any one or more of the above reactions. In some aspects, the microorganism of the present disclosure is capable of performing any one or more of the reactions described in FIG. 13.

[1333] In one aspect, a microorganism of the present disclosure is capable of (1) converting a hexose, such as glucose, to D-Ribose-5P and/or (2) D-xylulose-5P and/or D-ribulose-5P. In one aspect, a microorganism of the present disclosure is capable of converting D-Ribose-5P to D-Ribulose-5P via expression of rpiA. In one aspect, a microorganism of the present disclosure is capable of converting D-Ribulose-5P to D-Xylulose-5P via expression of rpe. In one aspect, a microorganism of the present disclosure is capable of converting D-Xylulose-5P to D-Ribulose-5P via expression of rpe. In one aspect, a microorganism of the present disclosure is capable of converting D-Ribulose-5P to D-Ribulose-1P via expression of PPM. In one aspect, a microorganism of the present disclosure is capable of converting D-Xylulose-5P to D-Xylulose-1P via expression of PPM. In one aspect, a microorganism of the present disclosure is capable of converting D-Ribulose-1P to D-Ribulose via expression of, but not limited to, EC 3.1.3.- and/or EC 2.7.1.17. In one aspect, a microorganism of the present disclosure is capable of converting D-Xylulose-1P to D-Xylulose via expression of, but not limited to, EC 3.1.3.- and/or EC 2.7.1.17. In one aspect, a microorganism of the present disclosure is capable of converting D-Ribulose to D-Xylulose via expression of, but not limited to, EC 5.1.3.31 and/or EC 5.1.3.30. In one aspect, a microorganism of the present disclosure is capable of converting D-Xylulose to Xylitol via expression of, but not limited to, EC 1.1.1.9. In some aspects, the microorganism of the present disclosure is capable of performing any one or more of the above reactions. In some aspects, the microorganism of the present disclosure is capable of performing any one or more of the reactions described in FIG. 14.

[1334] In some aspects, the enzymes indicated above include xylitol hydrogenase (EC 1.1.1.9) which is involved in the hydrogenation of D-xylulose to xylitol. In some aspects, the enzymes indicated above include sugar phosphatase (EC 3.1.3-, or EC 3.1.3.23) or xylulokinase (EC 2.7.1.17) which are involved in the conversion of D-xylulose-1P to D-xylulose and/or of D-ribulose-1P to D-ribulose. In some aspects, the enzymes indicated above include D-psicose 3-epimerase (EC 5.1.3.30) or D-tagatose 3-epimerase (EC 5.1.3.31), which are involved in the conversion of D-ribulose to D-xylulose.

[1335] In some aspects, the one or more enzymes are heterologous to the microorganism. In some aspects, some of the enzymes are heterologous to the microorganism and other enzymes are native to the microorganism.

Methods of Producing a Recombinant Microorganism that Produces or Accumulates MEG (or Glycolic Acid), or Optionally, MEG (or glycolic Acid) and One or More Co-Product

[1336] As described above, in one aspect, the present application provides methods of producing a recombinant microorganism that produces or accumulates MEG (or glycolic acid) from one or more exogenous hexose feedstock via one or more pentose-5-phosphate intermediate, comprising: introducing into or expressing in the recombinant microorganism one or more enzyme for the conversion of the one or more hexose feedstock to the one or more pentose-5-phosphate intermediate; introducing into or expressing in the recombinant microorganism one or more enzyme for the conversion of the one or more pentose-5-phosphate intermediate to one or more pentose or pentose-1-phosphate intermediate; introducing into or expressing in the recombinant microorganism a C2 pathway comprising one or more enzyme for the production of MEG or GA from glycolaldehyde; and introducing into or expressing in the recombinant microorganism a C3 pathway comprising one or more enzyme for the production of MEG or GA derived from DHAP or pyruvate; and culturing the recombinant microorganism in a culture medium containing the one or more hexose feedstock to produce or accumulate MEG or GA, wherein glycolaldehyde and DHAP (or pyruvate) are intermediates produced in the C2 pathway, and wherein MEG or GA are produced in both the C2 and C3 pathways. In some embodiments, the glycolaldehyde is oxidized to glycolic acid by a glycolaldehyde dehydrogenase.

[1337] In another aspect, the present application provides methods of producing a recombinant microorganism that produces or accumulates MEG (or glycolic acid) and one or more co-product from one or more exogenous hexose feedstock via one or more pentose-5-phosphate intermediate, comprising: introducing into or expressing in the recombinant microorganism one or more enzyme for the conversion of the one or more hexose feedstock to the one or more pentose-5-phosphate intermediate; introducing into or expressing in the recombinant microorganism one or more enzyme for the conversion of the one or more pentose-5-phosphate intermediate to one or more pentose or pentose-1-phosphate intermediate; introducing into or expressing in the recombinant microorganism a C2 pathway comprising one or more enzyme for the production of MEG or GA from glycolaldehyde; and introducing into or expressing in the recombinant microorganism a C3 pathway comprising one or more enzyme for the production of one or more co-product derived from DHAP or pyruvate; and culturing the recombinant microorganism in a culture medium containing the one or more hexose feedstock to produce or accumulate MEG or GA and one or more co-product, wherein glycolaldehyde and DHAP (or pyruvate) are intermediates produced in the C2 pathway, and wherein MEG or GA is produced in the C2 pathway and the one or more co-product is produced in the C3 pathway. In some embodiments, the glycolaldehyde is oxidized to glycolic acid by a glycolaldehyde dehydrogenase.

[1338] In some embodiments, the enzymes for the conversion of the one or more hexose feedstock to the one or more pentose-5-phosphate intermediate are selected from one or more enzyme having a transketolase activity, a transaldolase activity, a ribulose-5-phosphate 3-epimerase activity, and a ribose-5-phosphate isomerase activity. In further embodiments, the method further comprises introducing into the recombinant microorganism one or more modifications to diminish or delete activity in one or more endogenous enzymes selected from glyceraldehyde 3-phosphate dehydrogenase (gapA), phosphoglycerate kinase (pgk) and phosphoglycerate mutase (gpmA and/or gpmM).

[1339] In some embodiments, the enzymes for the conversion of the one or more hexose feedstock to the one or more pentose-5-phosphate intermediate are selected from one or more enzyme having a fructose-6-phosphate phosphoketolase activity, a phosphate acetyltransferase activity, a transketolase activity, a transaldolase activity, a ribulose-5-phosphate 3-epimerase activity, and a ribose-5-phosphate isomerase activity. In further embodiments, the method further comprises introducing into the recombinant microorganism one or more modifications to diminish or delete activity in an endogenous 6-phosphofructokinase (pfkA and/or pfkB) enzyme.

[1340] In yet further embodiments, the method further comprises: introducing into the recombinant microorganism one or more modifications to delete or diminish activity in one or more endogenous enzymes selected from glucose 6-phosphate-1-dehydrogenase, 6-phosphogluconolactonase, and 6-phosphogluconate dehydrogenase. In some embodiments, the glucose 6-phosphate-1-dehydrogenase is zwf, the 6-phosphogluconolactonase is pgl, and the 6-phosphogluconate dehydrogenase is gnd.

[1341] In some embodiments, the one or more enzyme for the conversion of the one or more pentose-5-phosphate intermediate to one or more pentose or pentose-1-phosphate intermediate are selected from one or more enzyme having a pentose phosphatase activity, a D-ribulose-5-phosphatase activity, a D-ribose-5-phosphatase activity, a D-ribose isomerase activity, an arabitol phosphate dehydrogenase activity, and a phosphopentomutase activity.

[1342] In some embodiments, the one or more enzyme for the production of MEG or GA derived from DHAP or pyruvate in the C3 pathway are selected from one or more enzyme having an activity selected from a 3-phosphoglycerate dehydrogenase activity, a phosphoserine aminotransferase activity, a 3-phosphohydroxypyruvate phosphatase activity, a phosphoserine phosphatase activity, a serine transaminase activity, a hydroxypyruvate decarboxylase activity, a 3-phosphohydroxypyruvate reductase activity, a glycolaldehyde reductase activity, a glycolaldehyde dehydrogenase activity, a serine oxidoreductase (deaminating) or serine-pyruvate aminotransferase activity, a serine decarboxylase activity, an ethanolamine aminotransferase or ethanolamine oxidoreductase (deaminating) activity, a glycerate decarboxylase activity, a hydroxypyruvate reductase activity, a 3-phosphoglycerate phosphatase activity, a 2-phosphoglycerate phosphatase activity, a glycerate 3-kinase activity, and a glycerate 2-kinase activity.

[1343] In some embodiments, the one or more enzyme for the production of one or more co-product derived from DHAP or pyruvate in the C3 pathway are selected from one or more enzyme having an activity selected from a thiolase or acetyl coenzyme A acetyltransferase activity, an acetyl-CoA:acetoacetate transferase or acetate:acetoacetyl-CoA hydrolase activity, and an acetoacetate decarboxylase activity, and the one or more co-product comprises acetone.

[1344] In some embodiments, the one or more enzyme for the production of one or more co-product derived from DHAP or pyruvate in the C3 pathway are selected from one or more enzyme having an activity selected from a thiolase or acetyl coenzyme A acetyltransferase activity, an acetyl-CoA:acetoacetate transferase or acetate:acetoacetyl-CoA hydrolase activity, an acetoacetate decarboxylase activity, and a secondary alcohol dehydrogenase activity, and the one or more co-product comprises isopropanol.

[1345] In some embodiments, the one or more enzyme for the production of one or more co-product derived from DHAP or pyruvate in the C3 pathway are selected from one or more enzyme having an activity selected from a thiolase or acetyl coenzyme A acetyltransferase activity, an acetyl-CoA:acetoacetate transferase or acetate:acetoacetyl-CoA hydrolase activity, an acetoacetate decarboxylase activity, a secondary alcohol dehydrogenase activity, and a dehydratase activity, and the one or more co-product comprises propene.

[1346] In some embodiments, the one or more enzyme for the production of one or more co-product derived from DHAP or pyruvate in the C3 pathway are selected from one or more enzyme having an activity selected from a thiolase or acetyl coenzyme A acetyltransferase activity, an acetyl-CoA:acetoacetate transferase or acetate:acetoacetyl-CoA hydrolase activity, an acetoacetate decarboxylase activity, a 3-hydroxyisovalerate (3HIV) synthase activity, a hydroxymethylglutaryl-CoA synthase activity, a methylglutaconyl-CoA hydratase activity, a methylcrotonyl-CoA carboxylase activity, a methylcrotonyl-CoA hydratase activity, a 3-hydroxyisovaleryl-CoA thioesterase activity, a 3HIV kinase activity, a 3HIV-3-phosphate decarboxylase activity, and a 3HIV decarboxylase activity, and the one or more co-product comprises isobutene.

[1347] In some embodiments, the one or more enzyme for the production of one or more co-product derived from DHAP or pyruvate in the C3 pathway are selected from one or more enzyme having an activity selected from a 3-phosphoglycerate dehydrogenase activity, a phosphoserine aminotransferase activity, a 3-phosphohydroxypyruvate phosphatase activity, a phosphoserine phosphatase activity, a serine oxidoreductase (deaminating) or serine-pyruvate aminotransferase activity, a hydroxypyruvate reductase activity, a 3-phosphoglycerate phosphatase activity, a 2-phosphoglycerate phosphatase activity, a glycerate 3-kinase activity, and a glycerate 2-kinase activity, and the one or more co-product comprises L-serine.

[1348] In some embodiments, the one or more enzyme for the production of one or more co-product derived from DHAP or pyruvate in the C3 pathway are selected from one or more enzyme having an activity selected from a serine hydroxymethyltransferase activity, a transferase activity, a formaldehyde dehydrogenase activity, a formate dehydrogenase activity, an activity associated with glycine cleavage system, a 3-phosphoglycerate dehydrogenase activity, a phosphoserine aminotransferase activity, a 3-phosphohydroxypyruvate phosphatase activity, a phosphoserine phosphatase activity, a serine transaminase activity, a hydroxypyruvate decarboxylase activity, a serine oxidoreductase (deaminating) activity, a serine decarboxylase activity, an ethanolamine aminotransferase or ethanolamine oxidoreductase (deaminating) activity, a hydroxypyruvate reductase activity, a 3-phosphoglycerate phosphatase activity, a 2-phosphoglycerate phosphatase activity, a glycerate 3-kinase activity, a glycerate 2-kinase activity, a glycolaldehyde dehydrogenase activity, a glycolate dehydrogenase activity, an alanine-glyoxylate aminotransferase activity, an alanine transaminase activity, and an NAD(P)H dependent glutamate dehydrogenase activity, and the one or more co-product comprises glycine. In other embodiments, the activity associated with glycine cleavage system comprise an enzyme or protein selected from a glycine decarboxylase (P protein), an aminomethyltransferase (T protein), a dihydrolipoamide dehydrogenase (L protein), and an H protein.

[1349] In some embodiments, the one or more enzyme for the production of one or more co-product derived from DHAP or pyruvate in the C3 pathway are selected from one or more enzyme having an activity selected from 3-phosphoglycerate dehydrogenase activity, a phosphoserine aminotransferase activity, a 3-phosphohydroxypyruvate phosphatase activity, a phosphoserine phosphatase activity, a transaminase activity, a hydroxypyruvate decarboxylase activity, a serine oxidoreductase (deaminating) or serine-pyruvate aminotransferase activity, a serine decarboxylase activity, a hydroxypyruvate reductase activity, a 3-phosphoglycerate phosphatase activity, a 2-phosphoglycerate phosphatase activity, a glycerate 3-kinase activity, a glycerate 2-kinase activity, an acetaldehyde dehydrogenase activity, and an ethanolamine ammonia lyase activity, and the one or more co-product comprises monoethanolamine (MEA).

[1350] In some embodiments, the one or more enzyme for the production of one or more co-product derived from DHAP or pyruvate in the C3 pathway are selected from one or more enzyme having an activity selected from a serine dehydrogenase activity, a 2-aminomalonate semialdehyde decarboxylase activity, an aminoacetaldehyde transaminase activity, a 2-aminomalonate semialdehyde transaminase activity, a 2,3-diaminopropanoate decarboxylase activity, a serine decarboxylase activity, an ethanolamine dehydrogenase activity, a serine hydroxymethyltransferase activity, an aldehyde oxidase activity, an N-acetyl transferase or O-acetyl transferase activity, an N-acetylserine dehydrogenase activity, a transaminase activity, a deacetylase activity, a serine aminase activity, and a 2,3-diaminopropanoate ammonia lyase activity, and the one or more co-product comprises ethylenediamine (EDA).

[1351] In some embodiments, the one or more enzyme for the production of MEG or GA in the C2 pathway are selected from one or more enzyme having an activity selected from a D-tagatose 3-epimerase activity, a D-ribulokinase activity, a D-ribulose-1-phosphate aldolase activity, a D-xylulose 1-kinase activity, a D-xylulose-1-phosphate aldolase activity, a xylose reductase or aldose reductase activity, a xylitol dehydrogenase activity, a xylose isomerase activity, a xylose dehydrogenase activity, a xylonolactonase activity, a xylonate dehydrogenase activity, a 2-keto-3-deoxy-D-pentonate aldolase activity, a glycolaldehyde reductase activity and a glycolaldehyde dehydrogenase activity.

[1352] In some embodiments, any of the methods of producing a recombinant microorganism described above further comprises: introducing into the recombinant microorganism one or more modifications to diminish or delete activity in a glycolaldehyde dehydrogenase, a lactate dehydrogenase, a xylose isomerase, a xylulose kinase or combination thereof.

### Hexose to Pentose-5-Phosphate Intermediate

[1353] In the present disclosure, glucose flux is funneled into the pentose phosphate pathway instead of the glycolysis pathway by using a non-oxidative entry into the pentose phosphate pathway.

[1354] [mA] In one embodiment, the application relates to a method of producing a recombinant microorganism capable of producing one or more pentose-5-phosphate intermediate from one or more hexose feedstock, comprising introducing into and/or overexpressing in the recombinant microorganism one or more of the following from (a) to (d):

[1355] (a) at least one endogenous or exogenous nucleic acid molecule encoding an enzyme having transketolase activity that catalyzes a reversible conversion of fructose-6-phosphate and glyceraldehyde-3-phosphate to erythrose-4-phosphate and D-xylulose-5-phosphate, respectively, and/or that catalyzes a reversible conversion of glyceraldehyde-3-phosphate from (b) and seduheptulose-7-phosphate from (b) to D-ribose-5-phosphate and D-xylulose-5-phosphate, respectively;

[1356] (b) at least one endogenous or exogenous nucleic acid molecule encoding an enzyme having transaldolase activity that catalyzes a reversible conversion of fructose-6-phosphate and erythrose-4-phosphate from (a) to glyceraldehyde-3-phosphate and seduheptulose-7-phosphate, respectively;

[1357] (c) at least one endogenous or exogenous nucleic acid molecule encoding an enzyme having ribose-5-phosphate isomerase activity that catalyzes an interconversion of D-ribose-5-phosphate from (a) and D-ribulose-5-phosphate;

[1358] (d) at least one endogenous or exogenous nucleic acid molecule encoding an enzyme having ribulose-5-phosphate 3-epimerase activity that catalyzes an interconversion of D-xylulose-5-phosphate from (a) and D-ribulose-5-phosphate from (c);

wherein the method optionally further comprises introducing a deletion, insertion, or loss of function mutation in a gene encoding a glyceraldehyde 3-phosphate dehydrogenase;
wherein the one more more hexose feedstock is converted to fructose-6-phosphate and glyceraldehyde-3-phosphate through an endogenous glycolysis pathway in the recombinant microorganism,
and wherein the one or more pentose-5-phosphate intermediate produced is one or more of D-ribose-5-phosphate, D-xylulose-5-phosphate or D-ribulose-5-phosphate.

[1359] [mB] In another embodiment, the application relates to a method of producing a recombinant microorganism capable of producing one or more pentose-5-phosphate intermediate from one or more hexose feedstock, comprising introducing into and/or overexpressing in the recombinant microorganism one or more of the following from (a) to (f):

[1360] (a) at least one endogenous or exogenous nucleic acid molecule encoding an enzyme having fructose-6-phosphate phosphoketolase activity that catalyzes a reversible conversion of fructose-6-phosphate to erythrose-4-phosphate and acetyl-phosphate;

[1361] (b) at least one endogenous or exogenous nucleic acid molecule encoding an enzyme having phosphate acetyltransferase activity that catalyzes a reversible conversion of acetyl-phosphate from (a) to acetyl-CoA;

[1362] (c) at least one endogenous or exogenous nucleic acid molecule encoding an enzyme having transaldolase activity that catalyzes a reversible conversion of fructose-6-phosphate and erythrose-4-phosphate from (a) to glyceraldehyde-3-phosphate and seduheptulose-7-phosphate, respectively;

[1363] (d) at least one endogenous or exogenous nucleic acid molecule encoding an enzyme having transketolase activity that catalyzes a reversible conversion of glyceraldehyde-3-phosphate from (c) and seduheptulose-7-phosphate from (c) to D-ribose-5-phosphate and D-xylulose-5-phosphate, respectively;

[1364] (e) at least one endogenous or exogenous nucleic acid molecule encoding an enzyme having ribose-5-phosphate isomerase activity that catalyzes an interconversion of D-ribose-5-phosphate from (d) and D-ribulose-5-phosphate;

[1365] (f) at least one endogenous or exogenous nucleic acid molecule encoding an enzyme having ribulose-5-phosphate 3-epimerase activity that catalyzes an interconversion of D-xylulose-5-phosphate from (d) and D-ribulose-5-phosphate from (e);

wherein the method optionally further comprises introducing a deletion, insertion, or loss of function mutation in a gene encoding a 6-phosphofructokinase;
wherein the one more more hexose feedstock is converted to fructose-6-phosphate through an endogenous glycolysis pathway in the recombinant microorganism,
wherein the acetyl-CoA produced in step (b) can be used to produce one or more co-products selected from acetone, isopropanol, propene, isobutene, and serine pathway compounds;
and wherein the one or more pentose-5-phosphate intermediate produced is one or more of D-ribose-5-phosphate, D-xylulose-5-phosphate or D-ribulose-5-phosphate.

[1366] In some embodiments, the oxidative branch of the pentose phosphate pathway is deleted or inactivated to optimize flux towards the non-oxidative entry into the pentose phosphate pathway.

[1367] [mC] Therefore, in one embodiment, the method of embodiment [mA] or embodiment [mB] optionally further comprises introducing into the recombinant microorganism one or more modifications selected from the group consisting of:

[1368] (i) a deletion, insertion, or loss of function mutation in a gene encoding a glucose 6-phosphate-1-dehydrogenase that catalyzes the conversion of glucose-6-phosphate to 6-phospho-D-glucono-1,5-lactone;

[1369] (ii) a deletion, insertion, or loss of function mutation in a gene encoding a 6-phosphogluconolactonase that catalyzes the conversion of 6-phospho-D-glucono-1,5-lactone to gluconate-6-phosphate; and

[1370] (iii) a deletion, insertion, or loss of function mutation in a gene encoding a 6-phosphogluconate dehydrogenase that catalyzes the conversion of gluconate-6-phosphate to D-ribulose-5-phosphate.

[1371] Connecting Pentose Phosphate Pathway and MEG (or Glycolic Acid) Production Pathways

[1372] In another aspect, a pentose-5-phosphate intermediate produced by the method of embodiment [mA] or embodiment [mB] (and optionally comprising embodiment [mC]) can be connected with any one of the known C2 MEG or glycolic acid production pathways by pentose phosphatases.

[1373] [mD] Therefore, in one embodiment, the application relates to a method of producing a recombinant microorganism capable of producing D-xylulose from D-xylulose-5-phosphate, wherein the method comprises introducing into or expressing in the recombinant microorganism one or more of a pentose-5-phosphatase, wherein the D-xylulose-5-phosphate is produced by non-oxidative branch of pentose phosphate pathway, and wherein the D-xylulose can be used to produce MEG (or glycolic acid) and optionally, one or more co-product.

[1374] [mE] In one embodiment, the application relates to a method of producing a recombinant microorganism capable of producing D-ribulose from D-ribulose-5-phosphate or from D-ribose-5-phosphate, wherein the method further comprises introducing into or expressing in the recombinant microorganism one or more of the following from (a) to (c):

[1375] (a) at least one endogenous or exogenous nucleic acid molecule encoding an enzyme having D-ribulose-5-phosphatase activity and/or an enzyme having pentose-5-phosphatase activity that catalyzes a reversible conversion of D-ribulose-5-phosphate to D-ribulose;

[1376] (b) at least one endogenous or exogenous nucleic acid molecule encoding an enzyme having D-ribose-5-phosphatase activity and/or an enzyme having pentose-5-phosphatase activity that catalyzes a reversible conversion of D-ribose-5-phosphate to D-ribose;

[1377] (c) at least one endogenous or exogenous nucleic acid molecule encoding an enzyme having D-ribose isomerase activity that catalyzes a reversible conversion of D-ribose from (b) to D-ribulose;

wherein the D-ribulose-5-phosphate and/or D-ribose-5-phosphate is produced by non-oxidative branch of pentose phosphate pathway, and wherein the D-ribulose can be used to produce MEG (or glycolic acid) and optionally, one or more co-product.

[1378] In another aspect, a pentose-5-phosphate intermediate produced by the method of embodiment [mA] or embodiment [mB] (and optionally comprising embodiment [mC]) can be connected with any one of the known C2 MEG or glycolic acid production pathways by arabitol phosphate dehydrogenases.

[1379] [mF] In one embodiment, the application relates to a method of producing a recombinant microorganism capable of producing D-ribulose-1-phosphate from D-xylulose-5-phosphate or producing D-xylulose-1-phosphate from D-ribulose-5-phosphate, wherein the method comprises introducing into or expressing in the recombinant microorganism one or more arabitol phosphate dehydrogenase, wherein the one or more arabitol phosphate dehydrogenase catalyzes one or more of the following from (a) to (d):

[1380] (a) a reversible conversion of D-xylulose-5-phosphate to D-arabitol-1-phosphate;

[1381] (b) a reversible conversion of D-arabitol-1-phosphate from (a) to D-ribulose-1-phosphate;

[1382] (c) a reversible conversion of D-ribulose-5-phosphate to D-arabitol-5-phosphate;

[1383] (d) a reversible conversion of D-arabitol-5-phosphate from (c) to D-xylulose-1-phosphate,

wherein the D-xylulose-5-phosphate and/or D-ribulose-5-phosphate is produced by non-oxidative branch of pentose phosphate pathway, and wherein the D-ribulose-1-phosphate and/or D-xylulose-1-phosphate can be used to produce MEG (or glycolic acid) and optionally, one or more co-product.

[1384] In another aspect, a pentose-5-phosphate intermediate produced by the method of embodiment [mA] or embodiment [mB] (and optionally comprising embodiment [mC]) can be connected with any one of the known C2 MEG or glycolic acid production pathways by phosphopentomutases.

[1385] [mG] In one embodiment, the application relates to a method of producing a recombinant microorganism capable of producing D-xylulose-1-phosphate from D-xylulose-5-phosphate or producing D-ribulose-1-phosphate from D-ribulose-5-phosphate, wherein the method comprises introducing into or expressing in the recombinant microorganism one or more phosphopentomutases, wherein the D-xylulose-5-phosphate and/or D-ribulose-5-phosphate is produced by non-oxidative branch of pentose phosphate pathway, and wherein the D-ribulose-1-phosphate and/or D-xylulose-1-phosphate can be used to produce MEG (or glycolic acid) and optionally, one or more co-product.

[1386] MEG (or Glycolic Acid), or Optionally MEG (or Glycolic Acid) and One or More Co-Product Production Pathways

[1387] In some embodiments, the pentose or pentose-1-phosphate intermediates produced in embodiments [mD], [mE], [mF], and [mG] are used in known MEG (or glycolic acid) C2 production pathways, which are coupled to C3 pathways, as described below, to co-produce additional MEG (or glycolic acid) or one or more co-products.

[1388] In some embodiments, MEG (or glycolic acid) is produced via a C2 pathway that uses D-xylulose-1-phosphate.

[1389] [mH] In one embodiment, the application relates to a method of producing a recombinant microorganism capable of producing monoethylene glycol (MEG) (or glycolic acid) from one or more hexose feedstock, wherein the method of embodiment [mA] or embodiment [mB] (and optionally comprising embodiment [mC]), and comprising additionally one or more of embodiments [mD], [mF], and [mG], further comprises introducing into or rexpressing in the recombinant microorganism one or more of the following from (a) to (d):

[1390] (a) at least one endogenous or exogenous nucleic acid molecule encoding an enzyme having D-xylulose 1-kinase activity that catalyzes the conversion of D-xylulose from embodiment [mD] to D-xylulose-1-phosphate;

[1391] (b) at least one endogenous or exogenous nucleic acid molecule encoding an enzyme having D-xylulose-1-phosphate aldolase activity that catalyzes the conversion of D-xylulose-1-phosphate from (a), from embodiment [mF] and/or from embodiment [mG], to glycolaldehyde and dihydroxyacetonephosphate (DHAP);

[1392] (c) at least one endogenous or exogenous nucleic acid molecule encoding an enzyme having glycolaldehyde reductase activity or an an enzyme having aldehyde reductase activity that catalyzes the conversion of glycolaldehyde from (b) to MEG;

[1393] (d) at least one endogenous or exogenous nucleic acid molecule encoding an enzyme having glycolaldehyde dehydrogenase activity that catalyzes the conversion of glycolaldehyde from (b) to glycolic acid;

wherein MEG (or glycolic acid) and DHAP are produced.

[1394] In some embodiments, MEG (or glycolic acid) is produced via a C2 pathway that uses D-ribulose-1-phosphate.

[1395] [mI] In one embodiment, the application relates to a method of producing a recombinant microorganism capable of producing monoethylene glycol (MEG) (or glycolic acid) from one or more hexose feedstock, wherein the method of embodiment [mA] or embodiment [mB] (and optionally comprising embodiment [mC]), and comprising additionally one or more of embodiments [mD], [mE], [mF], and [mG], further comprises introducing into or expressing in the recombinant microorganism one or more of the following from (a) to (e):

[1396] (a) at least one endogenous or exogenous nucleic acid molecule encoding an enzyme having D-tagatose 3-epimerase activity that catalyzes the conversion of D-xylulose from embodiment [mD] to D-ribulose;

[1397] (b) at least one endogenous or exogenous nucleic acid molecule encoding an enzyme having D-ribulokinase activity that catalyzes the conversion of D-ribulose from (a) and/or from embodiment [mE] to D-ribulose-1-phosphate;

[1398] (c) at least one endogenous or exogenous nucleic acid molecule encoding an enzyme having D-ribulose-1-phosphate aldolase activity that catalyzes the conversion of D-ribulose-1-phosphate from (b), from embodiment [mF] and/or from embodiment [mG] to glycolaldehyde and dihydroxyacetonephosphate (DHAP);

[1399] (d) at least one endogenous or exogenous nucleic acid molecule encoding an enzyme having glycolaldehyde reductase activity that catalyzes the conversion of glycolaldehyde from (c) to MEG;

[1400] (e) at least one endogenous or exogenous nucleic acid molecule encoding an enzyme having glycolaldehyde dehydrogenase activity that catalyzes the conversion of glycolaldehyde from (c) to glycolic acid;

wherein MEG (or glycolic acid) and DHAP are produced.

[1401] In some embodiments, MEG (or glycolic acid) is produced via a C2 pathway that uses D-xylonate.

[1402] [mJ] In one embodiment, the application relates to a method of producing a recombinant microorganism capable of producing monoethylene glycol (MEG) (or glycolic acid) from one or more hexose feedstock, wherein the method of embodiment [mA] or embodiment [mB] (and optionally comprising embodiment [mC]), and comprising additionally embodiment [mD], further comprises introducing into and/or expressing in the recombinant microorganism one or more of the following from (a) to (d):

[1403] (a) at least one endogenous or exogenous nucleic acid molecule encoding an enzyme having xylose isomerase activity that catalyzes the conversion of D-xylulose from embodiment [mD] to D-xylose;

[1404] (b) at least one endogenous or exogenous nucleic acid molecule encoding an enzyme having xylose dehydrogenase activity that catalyzes the conversion of D-xylose from (a) to D-xylonolactone;

[1405] (c) at least one endogenous or exogenous nucleic acid molecule encoding an enzyme having xylonolactonase activity that catalyzes the conversion of D-xylonolactone from (b) to D-xylonate;

[1406] (d) at least one endogenous or exogenous nucleic acid molecule encoding an enzyme having xylose dehydrogenase activity that catalyzes the conversion of D-xylose from (a) to D-xylonate;

wherein the method further comprises introducing into or expressing in the recombinant microorganism one or more of the following from (e) to (h):
[1407] (e) at least one endogenous or exogenous nucleic acid molecule encoding an enzyme having xylonate dehydratase activity that catalyzes the conversion of D-xylonate from (c) or (d) to 2-keto-3-deoxy-xylonate;

[1408] (f) at least one endogenous or exogenous nucleic acid molecule encoding an enzyme having 2-keto-3-deoxy-D-pentonate aldolase activity that catalyzes the conversion of 2-keto-3-deoxy-xylonate from (e) to glycolaldehyde and pyruvate;

[1409] (g) at least one endogenous or exogenous nucleic acid molecule encoding an enzyme having glycolaldehyde reductase activity that catalyzes the conversion of glycolaldehyde from (0 to MEG;

[1410] (h) at least one endogenous or exogenous nucleic acid molecule encoding an enzyme having glycolaldehyde dehydrogenase activity that catalyzes the conversion of glycolaldehyde from (0 to glycolic acid;

wherein MEG (or glycolic acid) and pyruvate are produced.

[1411] In some embodiments, the C2 pathway for production of MEG (or glycolic acid) comprises embodiment [mH] and the C3 pathway for production of MEG (or glycolic acid) comprises embodiment [mK]. In other embodiments, the C2 pathway for production of MEG (or glycolic acid) comprises embodiment [mH] and the C3 pathway for production of MEG (or glycolic acid) comprises embodiment [mL]. In some embodiments, the C2 pathway for production of MEG (or glycolic acid) comprises embodiment [mI] and the C3 pathway for production of MEG (or glycolic acid) comprises embodiment [mK]. In further embodiments, the C2 pathway for production of MEG (or glycolic acid) comprises embodiment [mI] and the C3 pathway for production of MEG (or glycolic acid) comprises embodiment [mL]. In some embodiments, the C2 pathway for production of MEG (or glycolic acid) comprises embodiment [mJ] and the C3 pathway for production of MEG (or glycolic acid) comprises embodiment [mK]. In some embodiments, the C2 pathway for production of MEG (or glycolic acid) comprises embodiment [mJ] and the C3 pathway for production of MEG (or glycolic acid) comprises embodiment [mL].

[1412] [mK] In one embodiment, the application relates to a method of producing a recombinant microorganism capable of producing monoethylene glycol (MEG) (or glycolic acid) from one or more hexose feedstock, wherein the method of embodiment [mA] or embodiment [mB] (and optionally comprising embodiment [mC]), and comprising additionally one or more of embodiments [mD], [mE], [mF], and [mG], further comprising one or more of embodiments [mH], [mI], and [mJ], further comprises introducing into and/or expressing in the recombinant microorganism one or more of the following from (a) to (h):

[1413] (a) at least one endogenous or exogenous nucleic acid molecule encoding an enzyme having 3-phosphoglycerate dehydrogenase activity that catalyzes the conversion of 3-phosphoglycerate to 3-phosphohydroxypyruvate;

[1414] (b) at least one endogenous or exogenous nucleic acid molecule encoding an enzyme having phosphoserine aminotransferase activity that catalyzes the conversion of 3-phosphohydroxypyruvate from (a) to phospho-L-serine;

[1415] (c) at least one endogenous or exogenous nucleic acid molecule encoding an enzyme having 3-phosphohydroxypyruvate phosphatase activity that catalyzes the conversion of 3-phosphohydroxypyruvate from (a) to hydroxypyruvate;

[1416] (d) at least one endogenous or exogenous nucleic acid molecule encoding an enzyme having phosphoserine phosphatase activity that catalyzes the conversion of phospho-L-serine from (b) to L-serine;

[1417] (e) at least one endogenous or exogenous nucleic acid molecule encoding an enzyme having L-serine transaminase or serine oxidase activity that catalyzes the conversion of L-serine from (d) to hydroxypyruvate;

[1418] (f) at least one endogenous or exogenous nucleic acid molecule encoding an enzyme having hydroxypyruvate decarboxylase activity that catalyzes the conversion of hydroxypyruvate from (c) or (e) to glycolaldehyde;

[1419] (g) at least one endogenous or exogenous nucleic acid molecule encoding an enzyme having glycolaldehyde reductase activity that catalyzes the conversion of glycolaldehyde from (f) to MEG;

[1420] (h) at least one endogenous or exogenous nucleic acid molecule encoding an enzyme having glycolaldehyde dehydrogenase activity that catalyzes the conversion of glycolaldehyde from (f) to glycolic acid;

wherein the produced intermediate DHAP from embodiments [mH] and/or [mI] and/or pyruvate from embodiment [mJ] is converted to 3-phosphoglycerate through endogenous glycolysis or gluconeogenesis, respectively, in the microorganism, and wherein MEG (or glycolic acid) is produced.

[1421] [mL] In one embodiment, the application relates to a method of producing a recombinant microorganism capable of producing monoethylene glycol (MEG) (or glycolic acid) from one or more hexose feedstock, wherein the method of embodiment [mA] or embodiment [mB] (and optionally comprising embodiment [mC]), and comprising additionally one or more of embodiments [mD], [mE], [mF], and [mG], further comprising one or more of embodiments [mH], [mI], and [mJ], further comprises introducing into and/or expressing in the recombinant microorganism one or more of the following from (a) to (j):

[1422] (a) at least one endogenous or exogenous nucleic acid molecule encoding an enzyme having 2-phosphoglycerate phosphatase activity and/or an enzyme having glycerate-2-kinase activity that catalyzes the conversion of 2-phosphoglycerate to glycerate;

[1423] (b) at least one endogenous or exogenous nucleic acid molecule encoding an enzyme having 3-phosphoglycerate phosphatase activity or an enzyme having glycerate-3-kinase activity that catalyzes the conversion of 3-phosphoglycerate to glycerate;

[1424] (c) at least one endogenous or exogenous nucleic acid molecule encoding an enzyme having hydroxypyruvate reductase activity that catalyzes the conversion of glycerate from (a) and/or (b) to hydroxypyruvate;

[1425] (d) at least one endogenous or exogenous nucleic acid molecule encoding an enzyme having serine aminotransferase activity or an enzyme having serine oxidoreductase (deaminating) activity that catalyzes the conversion of L-serine to hydroxypyruvate;

[1426] (e) at least one endogenous or exogenous nucleic acid molecule encoding an enzyme having L-serine decarboxylase activity that catalyzes the conversion of L-serine to ethanolamine;

[1427] (f) at least one endogenous or exogenous nucleic acid molecule encoding an enzyme having hydroxypyruvate decarboxylase activity that catalyzes the conversion of hydroxypyruvate from (c) and/or (d) to glycolaldehyde;

[1428] (g) at least one endogenous or exogenous nucleic acid molecule encoding an enzyme having ethanolamine aminotransferase or ethanolamine oidoreductase (deaminating) activity that catalyzes the conversion of ethanolamine from (e) to glycolaldehyde;

[1429] (h) at least one endogenous or exogenous nucleic acid molecule encoding an enzyme having glycerate decarboxylase activity that catalyzes the conversion of glycerate from (a) and/or (b) to MEG;

[1430] (i) at least one endogenous or exogenous nucleic acid molecule encoding an enzyme having glycolaldehyde reductase activity that catalyzes the conversion of glycolaldehyde from (0 and/or (g) to MEG;

[1431] (j) at least one endogenous or exogenous nucleic acid molecule encoding an enzyme having glycolaldehyde dehydrogenase activity that catalyzes the conversion of glycolaldehyde from (0 and/or (g) to glycolic acid;

wherein the produced intermediate DHAP from embodiments [mH] and/or [mI] and/or pyruvate from embodiment [mJ] is converted to 3-phosphoglycerate and/or 2-phosphoglycerate through endogenous glycolysis or gluconeogenesis in the microorganism, and wherein MEG (or glycolic acid) is produced.

[1432] In some embodiments, the C2 pathway for production of MEG (or glycolic acid) comprises embodiment [mH] and the C3 pathway for production of acetone comprises embodiment [mM]. In some embodiments, the C2 pathway for production of MEG (or glycolic acid) comprises embodiment [mI] and the C3 pathway for production of acetone comprises embodiment [mM]. In some embodiments, the C2 pathway for production of MEG (or glycolic acid) comprises embodiment [mJ] and the C3 pathway for production of acetone comprises embodiment [mM].

[1433] [mM] In one embodiment, the application relates to a method of producing a recombinant microorganism capable of co-producing monoethylene glycol (MEG) (or glycolic acid) and acetone, from one or more hexose feedstock, wherein the method of embodiment [mA] or embodiment [mB] (and optionally comprising embodiment [mC]), and comprising additionally one or more of embodiments [mD], [mE], [mF] and [mG], further comprising one or more of embodiments [mH], [mI], and [mJ], further comprises introducing into and/or expressing in the recombinant microorganism one or more of the following from (a) to (c):

[1434] (a) at least one endogenous or exogenous nucleic acid molecule encoding an enzyme having thiolase or acetyl coenzyme A acetyltransferase activity that catalyzes the conversion of acetyl-CoA to acetoacetyl-CoA;

[1435] (b) at least one endogenous or exogenous nucleic acid molecule encoding an enzyme having acetyl-CoA:acetoacetate-CoA transferase activity or an enzyme having acetate:acetoacetyl-CoA hydrolase activity that catalyzes the conversion of acetoacetyl-CoA from (a) to acetoacetate; and/or

[1436] (c) at least one endogenous or exogenous nucleic acid molecule encoding an enzyme having acetoacetate decarboxylase activity that catalyzes the conversion of acetoacetate from (b) to acetone;

wherein the produced intermediate DHAP from embodiments [mH] and/or [mI] and/or pyruvate from embodiment [mJ] is converted to acetyl-CoA through endogenous glycolysis in the microorganism, and wherein MEG (or glycolic acid) and acetone are co-produced.

[1437] In some embodiments, the C2 pathway for production of MEG (or glycolic acid) comprises embodiment [mH] and the C3 pathway for production of isobutene comprises embodiment [mN]. In some embodiments, the C2 pathway for production of MEG (or glycolic acid) comprises embodiment [mI] and the C3 pathway for production of isobutene comprises embodiment [mN]. In some embodiments, the C2 pathway for production of MEG (or glycolic acid) comprises embodiment [mJ] and the C3 pathway for production of isobutene comprises embodiment [mN].

[1438] [mN] In some embodiments, the application relates to a method of producing a recombinant microorganism capable of co-producing monoethylene glycol (MEG) (or glycolic acid) and isobutene via acetone or HMG-CoA, from one or more hexose feedstock, wherein the method of embodiment [mA] or embodiment [mB] (and optionally comprising embodiment [mC]), and comprising additionally one or more of embodiments [mD], [mE], [mF] and [mG], further comprising one or more of embodiments [mH], [mI], and [mJ], further comprises introducing into and/or expressing in the recombinant microorganism one or more of the following from (a) to (d):

[1439] (a) at least one endogenous or exogenous nucleic acid molecule encoding an enzyme having thiolase or acetyl coenzyme A acetyltransferase activity that catalyzes the conversion of acetyl-CoA to acetoacetyl-CoA;

[1440] (b) at least one endogenous or exogenous nucleic acid molecule encoding an enzyme having acetyl-CoA:acetoacetate-CoA transferase activity or an enzyme having acetate:acetoacetyl-CoA hydrolase activity that catalyzes the conversion of acetoacetyl-CoA from (a) to acetoacetate;

[1441] (c) at least one endogenous or exogenous nucleic acid molecule encoding an enzyme having acetoacetate decarboxylase activity that catalyzes the conversion of acetoacetate from (b) to acetone;

[1442] (d) at least one endogenous or exogenous nucleic acid molecule encoding an enzyme having 3-hydroxyisovalerate synthase activity that catalyzes the conversion of acetone from (c) and acetyl-CoA to 3-hydroxyisovalerate (3HIV);

[1443] or

wherein the the method comprises introducing into or expressing in the recombinant microorganism one or more of the following from (e) to (j):

[1444] (e) at least one endogenous or exogenous nucleic acid molecule encoding an enzyme having thiolase or acetyl coenzyme A acetyltransferase activity that catalyzes the conversion of acetyl-CoA to acetoacetyl-CoA;

[1445] (f) at least one endogenous or exogenous nucleic acid molecule encoding an enzyme having hydroxymethylglutaryl-CoA synthase activity that catalyzes the conversion of acetoacetyl-CoA from (e) and acetyl-CoA to 3-hydroxy-3-methylglutaryl-CoA (HMG-CoA);

[1446] (g) at least one endogenous or exogenous nucleic acid molecule encoding an enzyme having methylglutaconyl-CoA hydratase activity that catalyzes the conversion of HMG-CoA from (f) to 3-methylglutaconyl-CoA;

[1447] (h) at least one endogenous or exogenous nucleic acid molecule encoding an enzyme having methylcrotonyl-CoA carboxylase activity that catalyzes the conversion of 3-methylglutaconyl-CoA from (g) to 3-methylcrotonyl-CoA;

[1448] (i) at least one endogenous or exogenous nucleic acid molecule encoding an enzyme having methylcrotonyl-CoA hydratase activity that catalyzes the conversion of 3-methylcrotonyl-CoA from (h) to 3-hydroxyisovaleryl-CoA;

[1449] (j) at least one endogenous or exogenous nucleic acid molecule encoding an enzyme having 3-hydroxyisovaleryl-CoA thioesterase activity that catalyzes the conversion of 3-hydroxyisovaleryl-CoA from (i) to 3HIV;

wherein the method further introducing into or expressing in the recombinant microorganism (a1) and (a2), and/or (b1) selected from:

[1450] (a1) at least one endogenous or exogenous nucleic acid molecule encoding an enzyme having 3HIV kinase activity that catalyzes the conversion of 3HIV from (d) or (j) to 3HIV-3-phosphate;

[1451] (a2) at least one endogenous or exogenous nucleic acid molecule encoding an enzyme having 3HIV-3-phosphate decarboxylase activity that catalyzes the conversion of 3HIV-3-phosphate from (a1) to isobutene;

[1452] (b1) at least one endogenous or exogenous nucleic acid molecule encoding a an enzyme having 3HIV decarboxylase activity that catalyzes the conversion of 3HIV from (d) or (j) to isobutene;

wherein the produced intermediate DHAP from embodiments [mH] and/or [mI] and/or pyruvate from embodiment [mJ] is converted to acetyl-CoA through endogenous glycolysis in the microorganism, and wherein MEG (or glycolic acid) and isobutene are co-produced.

[1453] [mO] In one embodiment, the method of embodiment [mM] and/or [mN] (optionally comprising embodiment [EE]), optionally further comprise introducing into and/or expressing in the recombinant microorganism at least one endogenous or exogenous nucleic acid molecule encoding an enzyme having secondary alcohol dehydrogenase activity that catalyzes the conversion of acetone to isopropanol.

[1454] [mP] In another embodiment, the method of embodiment [mO] (optionally comprising embodiment [EE]), optionally further comprises introducing into and/or expressing in the recombinant microorganism at least one endogenous or exogenous nucleic acid molecule encoding an enzyme having dehydratase activity that catalyzes the conversion of isopropanol to propene.

[1455] In some embodiments, the C2 pathway for production of MEG (or glycolic acid) comprises embodiment [mH] and the C3 pathway for production of serine comprises embodiment [mQ]. In some embodiments, the C2 pathway for production of MEG (or glycolic acid) comprises embodiment [mI] and the C3 pathway for production of serine comprises embodiment [mQ]. In some embodiments, the C2 pathway for production of MEG (or glycolic acid) comprises embodiment [mJ] and the C3 pathway for production of serine comprises embodiment [mQ].

[1456] [mQ] In one embodiment, the application relates to a method of producing a recombinant microorganism capable of co-producing monoethylene glycol (MEG) (or glycolic acid) and serine, from one or more hexose feedstock and a nitrogen source, wherein the method of embodiment [mA] or embodiment [mB] (and optionally comprising embodiment [mC]), and comprising additionally one or more of embodiments [mD], [mE], [mF] and [mG], further comprising one or more of embodiments [mH], [mI], and [mJ], further comprises introducing into and/or expressing in the recombinant microorganism one or more of the following from (a) to (h):

[1457] (a) at least one endogenous or exogenous nucleic acid molecule encoding an enzyme having 3-phosphoglycerate dehydrogenase activity that catalyzes the conversion of 3-phosphoglycerate to 3-phosphohydroxypyruvate;

[1458] (b) at least one endogenous or exogenous nucleic acid molecule encoding an enzyme having 3-phosphoglycerate phosphatase activity and/or an enzyme having glycerate 3-kinase activity that catalyzes the conversion of 3-phosphoglycerate to glycerate;

[1459] (c) at least one endogenous or exogenous nucleic acid molecule encoding an enzyme having 2-phosphoglycerate phosphatase activity and/or an enzyme having glycerate 2-kinase activity that catalyzes the conversion of 2-phosphoglycerate to glycerate;

[1460] (d) at least one endogenous or exogenous nucleic acid molecule encoding an enzyme having phosphoserine aminotransferase activity that catalyzes the conversion of 3-phosphohydroxypyruvate from (a) to phospho-L-serine;

[1461] (e) at least one endogenous or exogenous nucleic acid molecule encoding an enzyme having 3-phosphohydroxypyruvate phosphatase activity that catalyzes the conversion of 3-phosphohydroxypyruvate from (a) to hydroxypyruvate;

[1462] (f) at least one endogenous or exogenous nucleic acid molecule encoding an enzyme having phosphoserine phosphatase activity that catalyzes the conversion of phospho-L-serine from (d) to L-serine;

[1463] (g) at least one endogenous or exogenous nucleic acid molecule encoding an enzyme having hydroxypyruvate reductase activity that catalyzes the conversion of glycerate from (b) and/or (c) to hydroxypyruvate;

[1464] (h) at least one endogenous or exogenous nucleic acid molecule encoding an enzyme having serine-pyruvate aminotransferase activity that catalyzes the conversion of hydroxypyruvate from (e) and/or (g) to L-serine;

wherein the produced intermediate DHAP from embodiments [mH] and/or [mI] and/or pyruvate from embodiment [mJ] is converted to 3-phosphoglycerate and/or 2-phosphoglycerate through endogenous glycolysis or gluconeogenesis in the microorganism, and wherein MEG (or glycolic acid) and serine are produced.

[1465] In some embodiments, the C2 pathway for production of MEG (or glycolic acid) comprises embodiment [mH] and the C3 pathway for production of glycine comprises embodiment [mR]. In other embodiments, the C2 pathway for production of MEG (or glycolic acid) comprises embodiment [mH] and the C3 pathway for production of glycine comprises embodiment [mS]. In further embodiments, the C2 pathway for production of MEG (or glycolic acid) comprises embodiment [mH] and the C3 pathway for production of glycine comprises embodiment [mT]. In some embodiments, the C2 pathway for production of MEG (or glycolic acid) comprises embodiment [mI] and the C3 pathway for production of glycine comprises embodiment [mR]. In other embodiments, the C2 pathway for production of MEG (or glycolic acid) comprises embodiment [mI] and the C3 pathway for production of glycine comprises embodiment [mS]. In further embodiments, the C2 pathway for production of MEG (or glycolic acid) comprises embodiment [mI] and the C3 pathway for production of glycine comprises embodiment [mT]. In some embodiments, the C2 pathway for production of MEG (or glycolic acid) comprises embodiment [mJ] and the C3 pathway for production of glycine comprises embodiment [mR]. In other embodiments, the C2 pathway for production of MEG (or glycolic acid) comprises embodiment [mJ] and the C3 pathway for production of glycine comprises embodiment [mS]. In further embodiments, the C2 pathway for production of MEG (or glycolic acid) comprises embodiment [mJ] and the C3 pathway for production of glycine comprises embodiment [mT].

[1466] [mR] In one embodiment, the application relates to a method of producing a recombinant microorganism capable of producing monoethylene glycol (MEG) (or glycolic acid) and glycine, from one or more hexose feedstock and a nitrogen source, wherein the method of embodiment [mA] or embodiment [mB] (and optionally comprising embodiment [mC]), and comprising additionally one or more of embodiments [mD], [mE], [mF] and [mG], further comprising one or more of embodiments [mH], [mI], and [mJ], further comprises introducing into or expressing in the recombinant microorganism one or more of the following from (a) to (e):

[1467] (a) at least one endogenous or exogenous nucleic acid molecule encoding an enzyme having serine hydroxymethyltransferase activity that catalyzes the conversion of L-serine and tetrahydrofolate (THF) to glycine and 5,10-methylene tetrahydrofolate (M-THF);

[1468] (b) at least one endogenous or exogenous nucleic acid molecule encoding an enzyme having transferase activity that catalyzes the conversion of M-THF from (a) to formaldehyde;

[1469] (c) at least one endogenous or exogenous nucleic acid molecule encoding an enzyme having formaldehyde dehydrogenase activity that catalyzes the conversion of formaldehyde from (b) to formate and NADH;

[1470] (d) at least one endogenous or exogenous nucleic acid molecule encoding an enzyme having formate dehydrogenase activity that catalyzes the conversion of formate from (c) to CO₂ and NADH;

[1471] (e) at least one endogenous or exogenous nucleic acid molecule encoding a protein of the glycine cleavage system that catalyze the conversion of M-THF from (a), CO₂, NH₃ and NADH from (c) or (d) to glycine and THF;

wherein THF is reconstituted from steps (b) through (e), wherein optionally formate from (c) is further oxidized to CO₂ and H2 by a formate hydrogenaselyase complex, and wherein MEG (or glycolic acid) and glycine are produced.

[1472] [mS] In one embodiment, the application relates to a method of producing a recombinant microorganism capable of co-producing monoethylene glycol (MEG) (or glycolic acid) and glycine, from one or more hexose feedstock and a nitrogen source, wherein the method of embodiment [mA] or embodiment [mB] (and optionally comprising embodiment [mC]), and comprising additionally one or more of embodiments [mD], [mE], [mF] and [mG], further comprising one or more of embodiments [mH], [mI], and [mJ], further comprises introducing into or expressing in the recombinant microorganism one or more of the following from (a) to (k):

[1473] (a) at least one endogenous or exogenous nucleic acid molecule encoding an enzyme having 3-phosphoglycerate dehydrogenase activity that catalyzes the conversion of 3-phosphoglycerate to 3-phosphohydroxypyruvate;

[1474] (b) at least one endogenous or exogenous nucleic acid molecule encoding an enzyme having phosphoserine aminotransferase activity that catalyzes the conversion of 3-phosphohydroxypyruvate from (a) to phospho-L-serine;

[1475] (c) at least one endogenous or exogenous nucleic acid molecule encoding an enzyme having 3-phosphohydroxypyruvate phosphatase activity that catalyzes the conversion of 3-phosphohydroxypyruvate from (a) to hydroxypyruvate;

[1476] (d) at least one endogenous or exogenous nucleic acid molecule encoding an enzyme having phosphoserine phosphatase activity that catalyzes the conversion of phospho-L-serine from (b) to L-serine;

[1477] (e) at least one endogenous or exogenous nucleic acid molecule encoding an enzyme having L-serine transaminase or serine oxidase activity that catalyzes the conversion of L-serine from (d) to hydroxypyruvate;

[1478] (f) at least one endogenous or exogenous nucleic acid molecule encoding an enzyme having hydroxypyruvate decarboxylase activity that catalyzes the conversion of hydroxypyruvate from (c) or (e) to glycolaldehyde;

[1479] (g) at least one endogenous or exogenous nucleic acid molecule encoding an enzyme having glycolaldehyde dehydrogenase activity that catalyzes the conversion of glycolaldehyde from (f) to glycolic acid;

[1480] (h) at least one endogenous or exogenous nucleic acid molecule encoding an enzyme having glycolate dehydrogenase activity that catalyzes the conversion of glycolic acid from (g) to glyoxylate;

[1481] (i) at least one endogenous or exogenous nucleic acid molecule encoding an enzyme having alanine-glyoxylate aminotransferase activity that catalyzes the conversion of glyoxylate from (h) and alanine to glycine and pyruvate;

[1482] (j) at least one endogenous or exogenous nucleic acid molecule encoding an enzyme having alanine transaminase activity that catalyzes the conversion of pyruvate from (i) and glutamate to alanine and 2-oxoglutarate;

[1483] (k) at least one endogenous or exogenous nucleic acid molecule encoding an enzyme having NAD(P)H dependent glutamate dehydrogenase activity that catalyzes the conversion of 2-oxoglutarate from (j) and ammonia to glutamate;

wherein the produced intermediate DHAP from embodiments [mH] and/or [mI] and/or pyruvate from embodiment [mJ] is converted to 3-phosphoglycerate and/or 2-phosphoglycerate through endogenous glycolysis or gluconeogenesis in the microorganism, wherein the glyoxylate for step (i) optionally comes from glyoxylate shunt in the microorganism, wherein alanine and glutamate are reconstituted from steps (j) and (k), and wherein MEG (or glycolic acid) and glycine are co-produced.

[1484] [mT] In one embodiment, the application relates to a method of producing a recombinant microorganism capable of co-producing monoethylene glycol (MEG) (or glycolic acid) and glycine, from one or more hexose feedstock and a nitrogen source, wherein the method of embodiment [A] or embodiment [B] (and optionally comprising embodiment [C]), and comprising additionally one or more of embodiments [D], [E], [F] and [G], further comprising one or more of embodiments [H], [I], and [J], further comprises introducing into or expressing in the recombinant microorganism one or more of the following from (a) to (1):

[1485] (a) at least one endogenous or exogenous nucleic acid molecule encoding an enzyme having 2-phosphoglycerate phosphatase activity and/or an enzyme having glycerate-2-kinase activity that catalyzes the conversion of 2-phosphoglycerate to glycerate;

[1486] (b) at least one endogenous or exogenous nucleic acid molecule encoding an enzyme having 3-phosphoglycerate phosphatase activity and/or an enzyme having glycerate-3-kinase activity that catalyzes the conversion of 3-phosphoglycerate to glycerate;

[1487] (c) at least one endogenous or exogenous nucleic acid molecule encoding an enzyme having hydroxypyruvate reductase activity that catalyzes the conversion of glycerate from (a) and/or (b) to hydroxypyruvate;

[1488] (d) at least one endogenous or exogenous nucleic acid molecule encoding an enzyme having serine aminotransferase or serine oxidoreductase (deaminating) activity that catalyzes the conversion of L-serine to hydroxypyruvate;

[1489] (e) at least one endogenous or exogenous nucleic acid molecule encoding an enzyme having L-serine decarboxylase activity that catalyzes the conversion of L-serine to ethanolamine;

[1490] (f) at least one endogenous or exogenous nucleic acid molecule encoding an enzyme having hydroxypyruvate decarboxylase activity that catalyzes the conversion of hydroxypyruvate from (c) and/or (d) to glycolaldehyde;

[1491] (g) at least one endogenous or exogenous nucleic acid molecule encoding an enzyme having ethanolamine aminotransferase activity or an enzyme having ethanolamine oidoreductase (deaminating) activity that catalyzes the conversion of ethanolamine from (e) to glycolaldehyde;

[1492] (h) at least one endogenous or exogenous nucleic acid molecule encoding an enzyme having glycolaldehyde dehydrogenase activity that catalyzes the conversion of glycolaldehyde from (f) and/or (g) to glycolic acid;

[1493] (i) at least one endogenous or exogenous nucleic acid molecule encoding an enzyme having glycolate dehydrogenase activity that catalyzes the conversion of glycolic acid from (g) to glyoxylate;

[1494] (j) at least one endogenous or exogenous nucleic acid molecule encoding an enzyme having alanine-glyoxylate aminotransferase activity that catalyzes the conversion of glyoxylate from (i) and alanine to glycine and pyruvate;

[1495] (k) at least one endogenous or exogenous nucleic acid molecule encoding an enzyme having alanine transaminase activity that catalyzes the conversion of pyruvate from (j) and glutamate to alanine and 2-oxoglutarate;

[1496] (l) at least one endogenous or exogenous nucleic acid molecule encoding an enzyme having NAD(P)H dependent glutamate dehydrogenase activity that catalyzes the conversion of 2-oxoglutarate from (k) and ammonia to glutamate;

wherein the produced intermediate DHAP from embodiments [mH] and/or [mI] and/or pyruvate from embodiment [mJ] is converted to 3-phosphoglycerate and/or 2-phosphoglycerate through endogenous glycolysis or gluconeogenesis in the microorganism, wherein the glyoxylate for step (j) optionally comes from glyoxylate shunt in the microorganism, wherein alanine and glutamate are reconstituted from steps (k) and (l), and wherein MEG (or glycolic acid) and glycine are co-produced.

[1497] In some embodiments, the C2 pathway for production of MEG (or glycolic acid) comprises embodiment [mH] and the C3 pathway for production of MEA comprises embodiment [mI]. In other embodiments, the C2 pathway for production of MEG (or glycolic acid) comprises embodiment [mH] and the C3 pathway for production of MEA comprises embodiment [mV]. In further embodiments, the C2 pathway for production of MEG (or glycolic acid) comprises embodiment [mH] and the C3 pathway for production of MEA comprises embodiment [mW]. In some embodiments, the C2 pathway for production of MEG (or glycolic acid) comprises embodiment [mI] and the C3 pathway for production of MEA comprises embodiment [mI]. In other embodiments, the C2 pathway for production of MEG (or glycolic acid) comprises embodiment [mI] and the C3 pathway for production of MEA comprises embodiment [mV]. In further embodiments, the C2 pathway for production of MEG (or glycolic acid) comprises embodiment [mI] and the C3 pathway for production of MEA comprises embodiment [mW]. In some embodiments, the C2 pathway for production of MEG (or glycolic acid) comprises embodiment [mJ] and the C3 pathway for production of MEA comprises embodiment [mil]. In other embodiments, the C2 pathway for production of MEG (or glycolic acid) comprises embodiment [mJ] and the C3 pathway for production of MEA comprises embodiment [mV]. In other embodiments, the C2 pathway for production of MEG (or glycolic acid) comprises embodiment [mJ] and the C3 pathway for production of MEA comprises embodiment [mW].

[1498] [mU] In one embodiment, the application relates to a method of producing a recombinant microorganism capable of co-producing monoethylene glycol (MEG) (or glycolic acid) and monoethanolamine (MEA), from one or more hexose feedstock and a nitrogen source, wherein the method of embodiment [mA] or embodiment [mB] (and optionally comprising embodiment [mC]), and comprising additionally one or more of embodiments [mD], [mE], [mF] and [mG], further comprising one or more of embodiments [mH], [mI], and [mJ], further comprises introducing into or expressing in the recombinant microorganism one or more of the following from (a) to (i):

[1499] (a) at least one endogenous or exogenous nucleic acid molecule encoding an enzyme having 3-phosphoglycerate dehydrogenase activity that catalyzes the conversion of 3-phosphoglycerate to 3-phosphohydroxypyruvate;

[1500] (b) at least one endogenous or exogenous nucleic acid molecule encoding an enzyme having 3-phosphoglycerate phosphatase activity and/or an enzyme having glycerate 3-kinase activity that catalyzes the conversion of 3-phosphoglycerate to glycerate;

[1501] (c) at least one endogenous or exogenous nucleic acid molecule encoding an enzyme having 2-phosphoglycerate phosphatase activity and/or an enzyme having glycerate 2-kinase activity that catalyzes the conversion of 2-phosphoglycerate to glycerate;

[1502] (d) at least one endogenous or exogenous nucleic acid molecule encoding an enzyme having phosphoserine aminotransferase activity that catalyzes the conversion of 3-phosphohydroxypyruvate from (a) to phospho-L-serine;

[1503] (e) at least one endogenous or exogenous nucleic acid molecule encoding an enzyme having 3-phosphohydroxypyruvate phosphatase activity that catalyzes the conversion of 3-phosphohydroxypyruvate from (a) to hydroxypyruvate;

[1504] (f) at least one endogenous or exogenous nucleic acid molecule encoding an enzyme having phosphoserine phosphatase activity that catalyzes the conversion of phospho-L-serine from (d) to L-serine;

[1505] (g) at least one endogenous or exogenous nucleic acid molecule encoding an enzyme having hydroxypyruvate reductase activity that catalyzes the conversion of glycerate from (b) and/or (c) to hydroxypyruvate;

[1506] (h) at least one endogenous or exogenous nucleic acid molecule encoding an enzyme having serine-pyruvate aminotransferase activity that catalyzes the conversion of hydroxypyruvate from (e) and/or (g) to L-serine;

[1507] (i) at least one endogenous or exogenous nucleic acid molecule encoding an enzyme having serine decarboxylase activity that catalyzes the conversion of L-serine from (f) and/or (h) to MEA;

wherein the produced intermediate DHAP from embodiments [mH] and/or [mI] and/or pyruvate from embodiment [mJ] is converted to 3-phosphoglycerate and/or 2-phosphoglycerate through endogenous glycolysis or gluconeogenesis in the microorganism, and wherein MEG (or glycolic acid) and MEA are co-produced.

[1508] [mV] In one embodiment, the application relates to a method of producing a recombinant microorganism capable of co-producing monoethylene glycol (MEG) (or glycolic acid) and monoethanolamine (MEA) from one or more hexose feedstock and a nitrogen source, wherein the method of embodiment [mA] or embodiment [mB] (and optionally comprising embodiment [mC]), and comprising additionally one or more of embodiments [mD], [mE], [mF], and [mG], further comprising one or more of embodiments [mH], [mI], and [mJ], further comprises introducing into or expressing in the recombinant microorganism one or more of the following from (a) to (f):

[1509] (a) at least one endogenous or exogenous nucleic acid molecule encoding an enzyme having 2-phosphoglycerate phosphatase activity and/or an enzyme having glycerate-2-kinase activity that catalyzes the conversion of 2-phosphoglycerate to glycerate;

[1510] (b) at least one endogenous or exogenous nucleic acid molecule encoding an enzyme having 3-phosphoglycerate phosphatase activity and/or an enzyme having glycerate-3-kinase activity that catalyzes the conversion of 3-phosphoglycerate to glycerate;

[1511] (c) at least one endogenous or exogenous nucleic acid molecule encoding an enzyme having hydroxypyruvate reductase activity that catalyzes the conversion of glycerate from (a) and/or (b) to hydroxypyruvate;

[1512] (d) at least one endogenous or exogenous nucleic acid molecule encoding an enzyme having serine-pyruvate aminotransferase or serine oxidoreductase (deaminating) activity that catalyzes the conversion of L-serine to hydroxypyruvate;

[1513] (e) at least one endogenous or exogenous nucleic acid molecule encoding an enzyme having hydroxypyruvate decarboxylase activity that catalyzes the conversion of hydroxypyruvate from (c) and/or (d) to glycolaldehyde;

[1514] (f) at least one endogenous or exogenous nucleic acid molecule encoding an enzyme having transaminase activity that catalyzes the conversion of glycolaldehyde from (e) to MEA;

wherein the produced intermediate DHAP from embodiments [mH] and/or [mI] and/or pyruvate from embodiment [mJ] is converted to 3-phosphoglycerate and/or 2-phosphoglycerate through endogenous glycolysis or gluconeogenesis in the microorganism, and wherein MEG (or glycolic acid) and MEA are co-produced.

[1515] [mW] In one embodiment, the application relates to a method of producing a recombinant microorganism capable of co-producing monoethylene glycol (MEG) (or glycolic acid) and monoethanolamine (MEA) from one or more hexose feedstock and a nitrogen source, wherein the method of embodiment [mA] or embodiment [mB] (and optionally comprising embodiment [mC]), and comprising additionally one or more of embodiments [mD], [mE], [mF], and [mG], further comprising one or more of embodiments [mH], [mI], and [mJ], further comprises introducing into or expressing in the recombinant microorganism one or more of the following from (a) to (b):

[1516] (a) at least one endogenous or exogenous nucleic acid molecule encoding an enzyme having acetaldehyde dehydrogenase activity that catalyzes the conversion of acetyl-CoA to acetaldehyde;

[1517] (b) at least one endogenous or exogenous nucleic acid molecule encoding an enzyme having ethanolamine ammonia lyase activity that catalyzes the conversion of acetaldehyde and ammonia to MEA;

wherein the produced intermediate DHAP from embodiments [mH] and/or [mI] and/or pyruvate from embodiment [mJ] is converted to acetyl-CoA through endogenous glycolysis in the microorganism, and wherein MEG (or glycolic acid) and MEA are co-produced.

[1518] In some embodiments, the C2 pathway for production of MEG (or glycolic acid) comprises embodiment [mH] and the C3 pathway for production of EDA comprises embodiment [mX]. In other embodiments, the C2 pathway for production of MEG (or glycolic acid) comprises embodiment [mH] and the C3 pathway for production of EDA comprises embodiment [mY]. In further embodiments, the C2 pathway for production of MEG (or glycolic acid) comprises embodiment [mH] and the C3 pathway for production of EDA comprises embodiment [mZ]. In yet further embodiments, the C2 pathway for production of MEG (or glycolic acid) comprises embodiment [mH] and the C3 pathway for production of EDA comprises embodiment [mAA]. In other embodiments, the C2 pathway for production of MEG (or glycolic acid) comprises embodiment [mH] and the C3 pathway for production of EDA comprises embodiment [mBB].

[1519] In some embodiments, the C2 pathway for production of MEG (or glycolic acid) comprises embodiment [mI] and the C3 pathway for production of EDA comprises embodiment [mX]. In other embodiments, the C2 pathway for production of MEG (or glycolic acid) comprises embodiment [mI] and the C3 pathway for production of EDA comprises embodiment [mY]. In further embodiments, the C2 pathway for production of MEG (or glycolic acid) comprises embodiment [mI] and the C3 pathway for production of EDA comprises embodiment [mZ]. In yet further embodiments, the C2 pathway for production of MEG (or glycolic acid) comprises embodiment [mI] and the C3 pathway for production of EDA comprises embodiment [mAA]. In other embodiments, the C2 pathway for production of MEG (or glycolic acid) comprises embodiment [mI] and the C3 pathway for production of EDA comprises embodiment [mBB].

[1520] In some embodiments, the C2 pathway for production of MEG (or glycolic acid) comprises embodiment [mJ] and the C3 pathway for production of EDA comprises embodiment [mX]. In other embodiments, the C2 pathway for production of MEG (or glycolic acid) comprises embodiment [mJ] and the C3 pathway for production of EDA comprises embodiment [mY]. In other embodiments, the C2 pathway for production of MEG (or glycolic acid) comprises embodiment [mJ] and the C3 pathway for production of EDA comprises embodiment [mZ]. In other embodiments, the C2 pathway for production of MEG (or glycolic acid) comprises embodiment [mJ] and the C3 pathway for production of EDA comprises embodiment [mAA]. In other embodiments, the C2 pathway for production of MEG (or glycolic acid) comprises embodiment [mJ] and the C3 pathway for production of EDA comprises embodiment [mBB].

[1521] [mX] In one embodiment, the application relates to a method of producing a recombinant microorganism capable of co-producing monoethylene glycol (MEG) (or glycolic acid) and ethylenediamine (EDA), from one or more hexose feedstock and a nitrogen source, wherein the method of embodiment [mA] or embodiment [mB] (and optionally comprising embodiment [mC]), and comprising additionally one or more of embodiments [mD], [mE], [mF] and [mG], further comprising one or more of embodiments [mH], [mI], and [mJ], further comprises introducing into or expressing in the recombinant microorganism one or more of the following from (a) to (c):

[1522] (a) at least one endogenous or exogenous nucleic acid molecule encoding an enzyme having serine dehydrogenase activity that catalyzes the conversion of L-serine to 2-aminomalonate semialdehyde;

[1523] (b) at least one endogenous or exogenous nucleic acid molecule encoding an enzyme having 2-aminomalonate semialdehyde decarboxylase activity that catalyzes the conversion of 2-aminomalonate semialdehyde from (a) to aminoacetaldehyde;

[1524] (c) at least one endogenous or exogenous nucleic acid molecule encoding an enzyme having aminoacetaldehyde transaminase activity that catalyzes the conversion of aminoacetaldehyde from (b) to EDA;

wherein 2-aminomalonate semialdehyde may optionally be converted to aminoacetaldehyde by a spontaneous reaction, and wherein MEG (or glycolic acid) and EDA are co-produced.

[1525] [mY] In one embodiment, the application relates to a method of producing a recombinant microorganism capable of co-producing monoethylene glycol (MEG) (or glycolic acid) and ethylenediamine (EDA), from one or more hexose feedstock and a nitrogen source, wherein the method of embodiment [mA] or embodiment [mB] (and optionally comprising embodiment [mC]), and comprising additionally one or more of embodiments [mD], [mE], [mF] and [mG], further comprising one or more of embodiments [mH], [mI], and [mJ], further comprises introducing into or expressing in the recombinant microorganism one or more of the following from (a) to (c):

[1526] (a) at least one endogenous or exogenous nucleic acid molecule encoding an enzyme having serine dehydrogenase activity that catalyzes the conversion of L-serine to 2-aminomalonate semialdehyde;

[1527] (b) at least one endogenous or exogenous nucleic acid molecule encoding an enzyme having 2-aminomalonate semialdehyde transaminase activity that catalyzes the conversion of 2-aminomalonate semialdehyde from (a) to 2,3-diaminopropanoate;

[1528] (c) at least one endogenous or exogenous nucleic acid molecule encoding an enzyme having 2,3-diaminopropanoate decarboxylase activity that catalyzes the conversion of 2,3-diaminopropanoate from (b) to EDA;

wherein MEG (or glycolic acid) and EDA are co-produced.

[1529] [mZ] In one embodiment, the application relates to a method of producing a recombinant microorganism capable of co-producing monoethylene glycol (MEG) (or glycolic acid) and ethylenediamine (EDA), from one or more hexose feedstock and a nitrogen source, wherein the method of embodiment [mA] or embodiment [mB] (and optionally comprising embodiment [mC]), and comprising additionally one or more of embodiments [mD], [mE], [mF] and [mG], further comprising one or more of embodiments [mH], [mI], and [mJ], further comprises introducing into or expressing in the recombinant microorganism one or more of the following from (a) to (c):

[1530] (a) at least one endogenous or exogenous nucleic acid molecule encoding an enzyme having serine decarboxylase activity that catalyzes the conversion of L-serine to ethanolamine;

[1531] (b) at least one endogenous or exogenous nucleic acid molecule encoding an enzyme having ethanolamine dehydrogenase activity that catalyzes the conversion of ethanolamine from (a) to aminoacetaldehyde;

[1532] (c) at least one endogenous or exogenous nucleic acid molecule encoding an enzyme having aminoacetaldehyde transaminase activity that catalyzes the conversion of aminoacetaldehyde from (b) to EDA;

wherein MEG (or glycolic acid) and EDA are co-produced.

[1533] [mAA] In one embodiment, the application relates to a method of producing a recombinant microorganism capable of co-producing monoethylene glycol (MEG) (or glycolic acid) and ethylenediamine (EDA), from one or more hexose feedstock and a nitrogen source, wherein the method of embodiment [mA] or embodiment [mB] (and optionally comprising embodiment [mC]), and comprising additionally one or more of embodiments [mD], [mE], [mF] and [mG], further comprising one or more of embodiments [mH], [mI], and [mJ], further comprises introducing into or expressing in the recombinant microorganism one or more of the following from (a) to (c):

[1534] (a) at least one endogenous or exogenous nucleic acid molecule encoding an enzyme having serine hydroxymethyltransferase activity that catalyzes the conversion of L-serine to glycine;

[1535] (b) at least one endogenous or exogenous nucleic acid molecule encoding an enzyme having aldehyde oxidase activity that catalyzes the conversion of glycine from (a) to aminoacetaldehyde;

[1536] (c) at least one endogenous or exogenous nucleic acid molecule encoding an enzyme having aminoacetaldehyde transaminase activity that catalyzes the conversion of aminoacetaldehyde from (b) to EDA;

wherein MEG (or glycolic acid) and EDA are co-produced.

[1537] [mBB] In one embodiment, the application relates to a method of producing a recombinant microorganism capable of co-producing monoethylene glycol (MEG) (or glycolic acid) and ethylenediamine (EDA), from one or more hexose feedstock and a nitrogen source, wherein the method of embodiment [mA] or embodiment [mB] (and optionally comprising embodiment [mC]), and comprising additionally one or more of embodiments [mD], [mE], [mF] and [mG], further comprising one or more of embodiments [mH], [mI], and [mJ], further comprises introducing into or expressing in the recombinant microorganism one or more of the following from (a) to (e):

[1538] (a) at least one endogenous or exogenous nucleic acid molecule encoding an enzyme having an amino acid N-acetyl transferase activity or O-acetyl transferase activity that catalyzes the conversion of L-serine to N-acetylserine;

[1539] (b) at least one endogenous or exogenous nucleic acid molecule encoding an enzyme having N-acetylserine dehydrogenase activity that catalyzes the conversion of N-acetylserine from (a) to N-acetylmalonate semialdehyde;

[1540] (c) at least one endogenous or exogenous nucleic acid molecule encoding an enzyme having transaminase activity that catalyzes the conversion of N-acetylmalonate semialdehyde from (b) to acetylaminopropanoate;

[1541] (d) at least one endogenous or exogenous nucleic acid molecule encoding an enzyme having deacetylase activity that catalyzes the conversion of acetylaminopropanoate from (c) to 2,3-diaminopropanoate;

[1542] (e) at least one endogenous or exogenous nucleic acid molecule encoding an enzyme having 2,3-diaminopropanoate decarboxylase activity that catalyzes the conversion of 2,3-diaminopropanoate from (d) to EDA;

wherein MEG (or glycolic acid) and EDA are co-produced.

[1543] In some embodiments, the C2 pathway for production of MEG (or glycolic acid) comprises embodiment [mH] and the C3 pathway for production of EDA comprises embodiment [mCC]. In other embodiments, the C2 pathway for production of MEG (or glycolic acid) comprises embodiment [mH] and the C3 pathway for production of EDA comprises embodiment [mDD]. In some embodiments, the C2 pathway for production of MEG (or glycolic acid) comprises embodiment [mI] and the C3 pathway for production of EDA comprises embodiment [mCC]. In other embodiments, the C2 pathway for production of MEG (or glycolic acid) comprises embodiment [mI] and the C3 pathway for production of EDA comprises embodiment [mDD]. In some embodiments, the C2 pathway for production of MEG (or glycolic acid) comprises embodiment [mJ] and the C3 pathway for production of EDA comprises embodiment [mCC]. In other embodiments, the C2 pathway for production of MEG (or glycolic acid) comprises embodiment [mJ] and the C3 pathway for production of EDA comprises embodiment [mDD].

[1544] [mCC] In one embodiment, the application relates to a method of producing a recombinant microorganism capable of co-producing monoethylene glycol (MEG) (or glycolic acid) and ethylenediamine (EDA), from one or more hexose feedstock and a nitrogen source, wherein the method of embodiment [mA] or embodiment [mB] (and optionally comprising embodiment [mC]), and comprising additionally one or more of embodiments [mD], [mE], [mF] and [mG], further comprising one or more of embodiments [mH], [mI], and [mJ], further comprises introducing into or expressing in the recombinant microorganism one or more of the following from (a) to (b):

[1545] (a) at least one endogenous or exogenous nucleic acid molecule encoding an enzyme having a serine aminase activity that catalyzes the conversion of L-serine to (S)-2,3-diaminopropanoate;

[1546] (b) at least one endogenous or exogenous nucleic acid molecule encoding an enzyme having an (S)-2,3-diaminopropanoate decarboxylase activity that catalyzes the conversion of (S)-2,3-diaminopropanoate from (a) to EDA;

wherein MEG (or glycolic acid) and EDA are co-produced.

[1547] [mDD] In one embodiment, the application relates to a method of producing a recombinant microorganism capable of co-producing monoethylene glycol (MEG) (or glycolic acid) and ethylenediamine (EDA), from one or more hexose feedstock and a nitrogen source, wherein the method of embodiment [mA] or embodiment [mB] (and optionally comprising embodiment [mC]), and comprising additionally one or more of embodiments [mD], [mE], [mF] and [mG], further comprising one or more of embodiments [mH], [mI], and [mJ], further comprises introducing into or expressing in the recombinant microorganism one or more of the following from (a) to (b):

[1548] (a) at least one endogenous or exogenous nucleic acid molecule encoding an enzyme having an (S)-2,3-diaminopropanoate ammonia lyase activity that catalyzes the conversion of pyruvate and ammonium to (S)-2,3-diaminopropanoate;

[1549] (b) at least one endogenous or exogenous nucleic acid molecule encoding an enzyme having (S)-2,3-diaminopropanoate decarboxylase activity that catalyzes the conversion of (S)-2,3-diaminopropanoate from (a) to EDA;

wherein pyruvate is produced from endogenous glycolysis, and wherein MEG (or glycolic acid) and EDA are co-produced.

[1550] [mEE] In another embodiment, the method selected from embodiment [mH], embodiment [mI], and embodiment [mJ], optionally further comprises introducing into the recombinant microorganism one or more modifications selected from the group consisting of:

[1551] (i) a deletion, insertion, or loss of function mutation in a gene encoding a xylose isomerase that catalyzes the conversion of D-xylulose to D-xylose;

[1552] (ii) a deletion, insertion, or loss of function mutation in a gene encoding a glycolaldehyde dehydrogenase that catalyzes the conversion of glycolaldehyde to glycolic acid; and

[1553] (iii) a deletion, insertion, or loss of function mutation in a gene encoding a lactate dehydrogenase that catalyzes the conversion of pyruvate to lactate.

### Enzyme Engineering

[1554] The enzymes in the recombinant microorganism can be engineered to improve one or more aspects of the substrate to product conversion. Non-limiting examples of enzymes that can be further engineered for use in methods of the disclosure include a transketolase, a transaldolase, a pentose-5-phosphatase, an arabitol phosphate dehydrogenase, a phosphopentomutase, an aldehyde reductase, an acetoacetyl coenzyme A hydrolase, a xylose isomerase, a 3-phosphoglycerate dehydrogenase, a phosphoserine aminotransferase, a 3-phosphohydroxypyruvate phosphatase, a phosphoserine phosphatase, a serine transaminase, a hydroxypyruvate decarboxylase, a 3-phosphohydroxypyruvate reductase, a glycolaldehyde dehydrogenase, a serine oxidoreductase (deaminating) or serine-pyruvate aminotransferase, a serine decarboxylase, an ethanolamine aminotransferase or ethanolamine oxidoreductase (deaminating), a glycerate decarboxylase, a hydroxypyruvate reductase, a 3-phosphoglycerate phosphatase, a 2-phosphoglycerate phosphatase, a glycerate 3-kinase, a glycerate 2-kinase, a mevalonate diphosphate decarboxylase, and combinations thereof. These enzymes can be engineered for improved catalytic activity, improved selectivity, improved stability, improved tolerance to various fermentation conditions (temperature, pH, etc.), or improved tolerance to various metabolic substrates, products, by-products, intermediates, etc. The term “improved catalytic activity” as used herein with respect to a particular enzymatic activity refers to a higher level of enzymatic activity than that measured relative to a comparable non-engineered enzyme.

[1555] Directed evolution is a term used to describe the entire range of molecular biology techniques that allow natural evolutionary processes to be mimicked in the laboratory. For enzymes, this generally involves the random mutagenesis of one or more starting genes, followed by a screening or selection step to isolate or enrich for enzyme variants with improvements in one or more desirable properties. The process can be iterated until the desired level of change is reached, or until no further change is elicited. A wide range of tools and techniques have been developed over more than two decades to shorten the process from the millions of years taken by nature, to just weeks or months in the laboratory. The most common strategies mimic the mechanisms of evolution that occur in nature, such as error-prone PCR (epPCR), which introduces random point mutations in a population of DNA products, and DNA shuffling techniques, which allow random recombination typically between parent genes with >70% homology. Later techniques accessed a wider range of amino acids through saturation or cassette mutagenesis targeted to pre-chosen sites or at randomly distributed sites, and enabled the random recombination of non-homologous genes. Further techniques can create random insertions and deletions of codons, shuffle domains or exons, or loop regions, and produce a library of random truncations.

[1556] For example, engineering methods have been used to alter the stability, substrate specificity and stereospecificity of aldolases to produce excellent enzymes for biocatalytic processes. The thermostability and solvent tolerance of fructose-1,6-bisphosphate aldolase (FBP-aldolase) was increased using family DNA shuffling of the fda genes from Escherichia coli and Edwardsiella ictaluri. A fourth generation variant was identified which displayed an average 280-fold higher half-life at 53° C. than either parent. The same variant also displayed enhanced activity in various polar and non-polar organic solvents (Hao and Berry 2004 Protein Eng Des Sel 17:689-697).

[1557] As another example, acetoacetyl coenzyme A hydrolase can convert acetoacetyl-CoA to acetoacetate. However, the hydrolase is unspecific in that it also reacts with the same magnitude of order with acetyl-CoA, which is the substrate required for acetoacetyl-CoA formation by the enzyme thiolase. Thus, to create more efficient acetoacetyl-CoA hydrolases, these enzymes have been engineered to have at least 10× higher activity for the acetoacetyl-CoA substrate than for acetyl-CoA substrate by replacing several glutamic acid residues in the enzyme beta subunit that is important for catalysis (WO 2015/042588).

[1558] As another example, the E. coli YqhD enzyme is a broad substrate aldehyde reductase with NADPH-dependent reductase activity for more than 10 aldehyde substrates and is a useful enzyme to produce biorenewable fuels and chemicals (Jarboe 2010 Applied Microbiology and Biotechnology 89:249). Though YqhD enzyme activity is beneficial through its scavenging of toxic aldehydes, the enzyme is also NADPH-dependent and contributes to NADPH depletion and growth inhibition of organisms. Error-prone PCR of YqhD was performed in order to improve 1,3-propanediol production from 3-hydroxypropionaldehyde (3-HPA). This directed engineering yielded two mutants, D99QN147H and Q202A, with decreased Km and increased kcat for certain aldehydes, particularly 3-HPA (Li et al. 2008 Prog. Nat. Sci. 18 (12):1519-1524). The improved catalytic activity of the D99QN147H mutant is consistent with what is known about the structure of YqhD (Sulzenbacher et al. 2004 J. Mol. Biol. 342 (2):489-502), as residues Asp99 and Asn147 both interact with NADPH. Use of the D99QN147H mutant increased 1,3-propanediol production from 3-HPA 2-fold. Mutant YqhD enzymes with increased catalytic efficiency (increased Kcat/Km) toward NADPH have also been described in WO 2011012697 A2, which is herein incorporated in its entirety.

[1559] As another example, xylose isomerase is a metal-dependent enzyme that catalyzes the interconversion of aldose and ketose sugars, primarily between xylose to xylulose and glucose to fructose. It has lower affinity for lyxose, arabinose and mannose sugars. The hydroxyl groups of sugars may define the substrate preference of sugar isomerases. The aspartate at residue 256 of Therms thermophilus xylose isomerase was replaced with arginine (Patel et al. 2012 Protein Engineering, Design & Selection vol. 25 no. 7 pp. 331-336). This mutant xylose isomerase exhibited an increase in specificity for D-lyxose, L-arabinose and D-mannose. The catalytic efficiency of the D256R xylose isomerase mutant was also higher for these 3 substrates compared to the wild type enzyme. It was hypothesized that the arginine at residue 256 in the mutant enzyme may play a role in the catalytic reaction or influence changes in substrate orientation.

[1560] As another example, the enzyme xylitol dehydrogenase plays a role in the utilization of xylose along with xylose reductase. Xylose reductase (XR) reduces xylose to xylitol and then xylitol dehydrogenase (XDH) reoxidizes xylitol to form xylulose. However, since XR prefers NADPH as cosubstrate, while XDH exclusively uses NAD+ as cosubstrate, a cosubstrate recycling problem is encountered. One solution is to engineer XDH such that its cosubstrate specificity is altered from NAD+ to NADP+ (Ehrensberger et al. 2006 Structure 14: 567-575). A crystal structure of the Gluconobacter oxydans holoenzyme revealed that Asp38 is largely responsible for the NAD+ specificity of XDH. Asp38 interacts with the hydroxyls of the adenosine ribose, and Met39 stacks under the purine ring and is also located near the 2′ hydroxyl. A double mutant (D38S/M39R) XDH was constructed that exclusively used NADP+ without loss of enzyme activity.

[1561] As another example, the enzyme mevalonate diphosphate decarboxylase (MVD) is an ATP-dependent enzyme which catalyzes the phosphorylation/decarboxylation of (R)-mevalonate-5-diphosphate to isopentenyl pyrophosphate (IPP) in the mevalonate (MVA) pathway. In the classical MVA pathway, MVD catalyzes the final step, where it produces IPP from (R)-mevalonate-5-diphosphate (MVAPP) in an irreversible reaction dependent upon ATP. MVAPP is phosphorylated first, and consequent decarboxylation occurs with the concomitant release of inorganic phosphate. With the same mechanism, classical MVDs also catalyze the conversion of the nonphosphorylated 3-hydroxyisovalerate (3-HIV) to isobutene. Mevalonate diphosphate (MDP) decarboxylase variants having improved activity in converting 3-phosphonoxyisovalerate into isobutene are disclosed in, for example, WO 2012052427 and WO 2015004211, each of which is herein incorporated in its entirety.

### Metabolic Engineering—Enzyme Overexpression or Enzyme Downregulation/Deletion for Increased Pathway Flux

[1562] In various embodiments described herein, the exogenous and endogenous enzymes in the recombinant microorganism participating in the biosynthesis pathways described herein may be overexpressed.

[1563] The terms “overexpressed” or “overexpression” refers to an elevated level (e.g., aberrant level) of mRNAs encoding for a protein(s), and/or to elevated levels of protein(s) in cells as compared to similar corresponding unmodified cells expressing basal levels of mRNAs or having basal levels of proteins. In particular embodiments, mRNA(s) or protein(s) may be overexpressed by at least 2-fold, 3-fold, 4-fold, 5-fold, 6-fold, 8-fold, 10-fold, 12-fold, 15-fold or more in microorganisms engineered to exhibit increased gene mRNA, protein, and/or activity.

[1564] In some embodiments, a recombinant microorganism of the disclosure is generated from a host that contains the enzymatic capability to synthesize substrates such as D-xylulose, D-ribulose, D-ribulose-1-phosphate, D-xylulose-1-phosphate, D-ribulose-5-phosphate, D-xylulose-5-phosphate, D-xylonolactone, D-xylonate, 2-keto-3-deoxy-xylonate, glycolaldehyde, DHAP, pyruvate, acetoacetyl-CoA, acetoacetate or 3-hydroxyisovalerate. In some embodiments, it can be useful to increase the synthesis or accumulation of, for example, D-xylulose, D-ribulose, D-ribulose-1-phosphate, D-xylulose-1-phosphate, D-ribulose-5-phosphate, D-xylulose-5-phosphate, D-ribose-5-phosphate, D-xylonolactone, D-xylonate, 2-keto-3-deoxy-xylonate, glycolaldehyde, DHAP, pyruvate, acetoacetyl-CoA, acetoacetate or 3-hydroxyisovalerate, to increase the production of MEG (or GA), or optionally, MEG (or GA) and one or more co-product.

[1565] In some embodiments, it may be useful to increase the expression of endogenous or exogenous enzymes involved in the MEG (or GA), or optionally, MEG (or GA) and one or more co-product, biosynthesis pathways to increase flux from, for example, D-xylulose, D-ribulose, D-ribulose-1-phosphate, D-xylulose-1-phosphate, D-ribulose-5-phosphate, D-xylulose-5-phosphate, D-ribose-5-phosphate, D-xylonolactone, D-xylonate, 2-keto-3-deoxy-xylonate, glycolaldehyde, DHAP, pyruvate, acetoacetyl-CoA, acetoacetate or 3-hydroxyisovalerate, thereby resulting in increased synthesis or accumulation of MEG (or GA), or optionally, MEG (or GA) and one or more co-product.

[1566] Increased synthesis or accumulation can be accomplished by, for example, overexpression of nucleic acids encoding one or more of the above-described MEG (or GA), or optionally, MEG (or GA) and one or more co-product, biosynthesis pathway enzymes. Overexpression of a MEG (or GA), or optionally, MEG (or GA) and one or more co-product biosynthesis pathway enzyme or enzymes can occur, for example, through increased expression of an endogenous gene or genes, or through the expression, or increased expression, of an exogenous gene or genes. Therefore, naturally occurring organisms can be readily modified to generate non-natural, MEG (or GA), or optionally, MEG (or GA) and one or more co-product, producing microorganisms through overexpression of one or more nucleic acid molecules encoding a MEG (or GA), or optionally, MEG (or GA) and one or more co-product, biosynthesis pathway enzyme. In addition, a non-naturally occurring organism can be generated by mutagenesis of an endogenous gene that results in an increase in activity of an enzyme in the MEG (or GA), or optionally, MEG (or GA) and one or more co-product, biosynthesis pathways.

[1567] Equipped with the present disclosure, the skilled artisan will be able to readily construct the recombinant microorganisms described herein, as the recombinant microorganisms of the disclosure can be constructed using methods well known in the art as exemplified above to exogenously express at least one nucleic acid encoding a MEG (or GA), or optionally, MEG (or GA) and one or more co-product, biosynthesis pathway enzyme in sufficient amounts to produce MEG (or GA), or optionally, MEG (or GA) and one or more co-product.

[1568] Methods for constructing and testing the expression levels of a non-naturally occurring MEG (or GA)-producing, or optionally, MEG (or GA) and one or more co-product producing, host can be performed, for example, by recombinant and detection methods well known in the art. Such methods can be found described in, for example, Sambrook et al., Molecular Cloning: A Laboratory Manual, Third Ed., Cold Spring Harbor Laboratory, New York (2001); Ausubo et al., Current Protocols in Molecular Biology, John Wiley and Sons, Baltimore, Md. (1999).

[1569] A variety of mechanisms known in the art can be used to express, or overexpress, exogenous or endogenous genes. For example, an expression vector or vectors can be constructed to harbor one or more MEG (or GA), or optionally, MEG (or GA) and one or more co-product, biosynthesis pathway enzymes encoding nucleic acids as exemplified herein operably linked to expression control sequences functional in the host organism. Expression vectors applicable for use in the microbial host organisms of the invention include, for example, plasmids, phage vectors, viral vectors, episomes and artificial chromosomes, including vectors and selection sequences or markers operable for stable integration into a host chromosome. Selectable marker genes also can be included that, for example, provide resistance to antibiotics or toxins, complement auxotrophic deficiencies, or supply critical nutrients not in the culture media. Expression control sequences can include constitutive and inducible promoters, transcription enhancers, transcription terminators, and the like which are well known in the art. When two or more exogenous encoding nucleic acids are to be co-expressed, both nucleic acids can be inserted, for example, into a single expression vector or in separate expression vectors. For single vector expression, the encoding nucleic acids can be operationally linked to one common expression control sequence or linked to different expression control sequences, such as one inducible promoter and one constitutive promoter. The transformation of exogenous nucleic acid sequences involved in a metabolic or synthetic pathway can be confirmed using methods well known in the art.

[1570] As will be understood by those of skill in the art, it can be advantageous to modify a coding sequence to enhance its expression in a particular host. The genetic code is redundant with 64 possible codons, but most organisms typically use a subset of these codons. The codons that are utilized most often in a species are called optimal codons, and those not utilized very often are classified as rare or low-usage codons. Codons can be substituted to reflect the preferred codon usage of the host, a process sometimes called “codon optimization” or “controlling for species codon bias.”

[1571] Optimized coding sequences containing codons preferred by a particular prokaryotic or eukaryotic host (see also, Murray et al. (1989) Nucl. Acids Res. 17:477-508) can be prepared, for example, to increase the rate of translation or to produce recombinant RNA transcripts having desirable properties, such as a longer half-life, as compared with transcripts produced from a non-optimized sequence. Translation stop codons can also be modified to reflect host preference. For example, typical stop codons for S. cerevisiae and mammals are UAA and UGA, respectively. The typical stop codon for monocotyledonous plants is UGA, whereas insects and E. coli commonly use UAA as the stop codon (Dalphin et al. (1996) Nucl. Acids Res. 24: 216-218).

[1572] Those of skill in the art will recognize that, due to the degenerate nature of the genetic code, a variety of nucleic acid sequences can be used to encode a given enzyme of the disclosure. The nucleic acid sequences encoding the biosynthetic enzymes are referenced herein merely to illustrate an embodiment of the disclosure, and the disclosure includes any nucleic acid sequences that encode the amino acid sequences of the polypeptides and proteins of the enzymes of the present disclosure. In similar fashion, a polypeptide can typically tolerate one or more amino acid substitutions, deletions, and insertions in its amino acid sequence without loss or significant loss of a desired activity. The disclosure includes such polypeptides with different amino acid sequences than the specific proteins described herein so long as the modified or variant polypeptides have the enzymatic anabolic or catabolic activity of the reference polypeptide. Furthermore, the amino acid sequences encoded by the nucleic acid sequences shown herein merely illustrate embodiments of the disclosure.

[1573] Expression control sequences are known in the art and include, for example, promoters, enhancers, polyadenylation signals, transcription terminators, internal ribosome entry sites (IRES), and the like, that provide for the expression of the polynucleotide sequence in a host cell. Expression control sequences interact specifically with cellular proteins involved in transcription (Maniatis et al., Science, 236: 1237-1245 (1987)). Exemplary expression control sequences are described in, for example, Goeddel, Gene Expression Technology: Methods in Enzymology, Vol. 185, Academic Press, San Diego, Calif. (1990).

[1574] In various embodiments, an expression control sequence may be operably linked to a polynucleotide sequence. By “operably linked” is meant that a polynucleotide sequence and an expression control sequence(s) are connected in such a way as to permit gene expression when the appropriate molecules (e.g., transcriptional activator proteins) are bound to the expression control sequence(s). Operably linked promoters are located upstream of the selected polynucleotide sequence in terms of the direction of transcription and translation. Operably linked enhancers can be located upstream, within, or downstream of the selected polynucleotide.

[1575] In some embodiments, the recombinant microorganism is manipulated to delete, disrupt, mutate, and/or reduce the activity of one or more endogenous enzymes that catalyzes a reaction in a pathway that competes with the biosynthesis pathway for the production of MEG (or GA), or optionally, MEG (or GA) and one or more co-product.

[1576] In some embodiments, the recombinant microorganism is manipulated to delete, disrupt, mutate, and/or reduce the activity of one or more endogenous enzymes in the oxidative branch of the pentose phosphate pathway. In some embodiments, the manipulation prevents the conversion of glucose-6-phosphate through the oxidative branch of the pentose phosphate pathway and instead shunts glucose-6-phosphate through the non-oxidative branch of the pentose phosphate pathway to produce one or more pentose-5-phosphate intermediate needed for the production of MEG (or GA), or optionally, MEG (or GA) and one or more co-product. In some such embodiments, the one or more endogenous enzyme is selected from glucose 6-phosphate-1-dehydrogenase, 6-phosphogluconolactonase, and 6-phosphogluconate dehydrogenase. In further embodiments, the glucose 6-phosphate-1-dehydrogenase is zwf, the 6-phosphogluconolactonase is pgl, and the 6-phosphogluconate dehydrogenase is gnd.

[1577] In some embodiments, the recombinant microorganism is manipulated to delete, disrupt, mutate, and/or reduce the activity of glyceraldehyde 3-phosphate dehydrogenase and/or phosphoglycerate kinase and/or phosphoglycerate mutase. In some embodiments, the manipulation prevents the conversion of glyceraldehyde 3-phosphate to 1,3-bisphospho-D-glycerate and subsequent intermediates and instead allow glyceraldehyde 3-phosphate to be converted to xylulose-5-phosphate (with a concurrent conversion of fructose-6-phosphate to erythrose-4-phosphate) by a transketolase, and thus produce a pentose-5-phosphate intermediate needed for the production of MEG, or optionally, MEG and one or more co-product, and provide more erythrose-4-phosphate for the non-oxidative branch of the pentose phosphate pathway to further produce one or more pentose-5-phosphate intermediate. In some embodiments, the glyceraldehyde 3-phosphate dehydrogenase is gapA, the phosphoglycerate kinase is pgk and the phosphoglycerate mutase is gpmA and/or gpmM.

[1578] In some embodiments, the recombinant microorganism is manipulated to delete, disrupt, mutate, and/or reduce the activity of 6-phosphofructokinase. In some embodiments, the manipulation prevents the conversion of fructose-6-phosphate to 1,6-bisphosphate and instead allow fructose-6-phosphate to be converted to erythrose-4-phosphate and acetyl-phosphate by a fructose-6-phosphate phosphoketolase, and provide more erythrose-4-phosphate for the non-oxidative branch of the pentose phosphate pathway to further produce one or more pentose-5-phosphate intermediate needed for the production of MEG (or GA), or optionally, MEG (or GA) and one or more co-product. In some embodiments, the 6-phosphofructokinase is pfkA and/or pfkB.

[1579] In some embodiments, the recombinant microorganism is manipulated to delete, disrupt, mutate, and/or reduce the activity of one or more endogenous enzymes that catalyzes the conversion of glycolaldehyde to glycolic acid. In some such embodiments, the enzyme that catalyzes the conversion of glycolaldehyde to glycolic acid is a glycolaldehyde dehydrogenase. In some embodiments, the glycolaldehyde dehydrogenase is from Escherichia coli. In some embodiments, the glycolaldehyde dehydrogenase is encoded by the aldA gene or homologs thereof. In some embodiments, the manipulation prevents the production of glycolic acid from glycolaldehyde and instead shunts the reaction toward conversion of glycolaldehyde to MEG. In some embodiments, the deletion, disruption, mutation, and/or reduction in the activity of one or more endogenous enzymes that catalyzes the conversion of glycolaldehyde to glycolic acid is partial, wherein some glycolaldehyde dehydrogenase function is still present and an amount of glycolic acid is still produced.

[1580] In some embodiments, the recombinant microorganism is manipulated to delete, disrupt, mutate, and/or reduce the activity of one or more endogenous enzymes that catalyzes the conversion of pyruvate to lactate. In some such embodiments, the enzyme that catalyzes the conversion of pyruvate to lactate is a lactate dehydrogenase. In some embodiments, the lactate dehydrogenase is from Escherichia coli. In some embodiments, the lactate dehydrogenase is encoded by the ldhA gene or homologs thereof. In some embodiments, the manipulation prevents the production of lactate from pyruvate and instead shunts the reaction toward production of isobutene.

[1581] In some embodiments, the recombinant microorganism is manipulated to delete, disrupt, mutate, and/or reduce the activity of one or more endogenous enzymes that catalyzes the conversion of D-xylulose to D-xylose. In some such embodiments, the enzyme that catalyzes the conversion of D-xylulose to D-xylose is a D-xylose isomerase. In some embodiments, the D-xylose isomerase is from E. coli. In some embodiments, the D-xylose isomerase is encoded by the xylA gene or homologs thereof. In some embodiments, the manipulation prevents conversion of D-xylulose to D-xylose and instead shunts the reaction toward the conversion of D-xylulose to D-xylulose-1-phosphate, D-xylulose-5-phosphate, or D-ribulose.

### EXAMPLES

### Example 1

[1582] In Vitro Enzymatic Assay for PGM3 Protein

[1583] The enzymatic assay of a phosphoglucomutase, which is a phosphopentomutase, encoded by ScPGM3 (SEQ ID NO: 255 or SEQ ID NO: 258)(PGM3 from Saccharomyces cerevisiae) was measured on its natural substrate, ribose-1-phosphate and glucose-1-phosphate in the presence of glucose-1,6-biphosphate, by monitoring the reduction of NADP+ into NADPH at OD 340 nm for 10 minutes (FIG. 15). Both glucose molecules were purchased from Merck. The reaction mixture contained HEPES 60 mM, pH 7.5, KCl 60 mM, MgCl₂ 3 mM, purified PGM3 protein, NADP⁺ 0.5 mM, glucose-1,6-bisphosphate 5 μM, glucose-1-phosphate 8 mM, and commercially available Glucose-6-Phosphate dehydrogenase at 3 U/mL (from Merck).

[1584] The activity on pentose-5P substrates (ribulose-5P and xylulose-5) was determined according to the scheme in FIG. 16. The reaction mixture contained HEPES 60 mM, pH 7.5, KCl 60 mM, MgCl₂ 3 mM, NADH 0.25 mM, glucose-1,6-biphosphate 5 μM, pentose (ribulose or xylulose) 5 mM, ATP 4 mM, purified PGM3 protein, purified ribokinase or ribulokinase, and aldoB obtained as previously described (Cam Y. et al. (2015) Engineering of a Synthetic Metabolic Pathway for the Assimilation of (d)-Xylose into Value-Added Chemicals. ACS Synth Biol), glycerol-3-phosphate dehydrogenase (GPDH) at 2 U/mL (Merck). Results showed xylulose-5P PGM3 specific activity was about 0.015 μmol min−1 mg−1, and ribulose-5P PGM3 specifity was about 0.016±0.002 μmol min−1 mg−1.

### Example 2

[1585] In Vivo Enzymatic Assay for PGM3 Protein

[1586] To assess the feasibility of using PGM3 for glycolic acid (GA) production in vivo, an assay was developed based on the use of a screening strain with the genotype MG1655 ΔtktA-ΔtktB. As described in FIG. 17, such a strain cannot grow on xylose by itself, because of the deletion of transketolase genes tktA (GenBank Gene ID: 947420) and tktB (GenBank Gene ID: 945865). However, a strain expressing an active PGM3 protein could use pentoses phosphorylated on carbon 5 to produce pentose phosphorylated on carbon 1, and subsequently convert pentose-1P to glycolaldehyde and DHAP by aldolase activity. Glycolaldehyde and glyceraldehyde-3-phosphate can enter the glyoxylate shunt and glycolysis and support strain growth. Consequently, in vivo PGM3 activity in the screening strain is directly correlated with cell growth.

[1587] Screening strain PGM3 (MG1655 ΔtktA-ΔtktB) was transformed by electroporation with plasmid carrying both S. cerevisiae PGM3 and proper aldolase (aldoB or fucA) using standard procedure (Woodall C. A. E. coli Plasmid Vectors. Methods in Molecular Biology™. 2003. vol 235). Resulting strains were grown in M9 xylose medium (20 g/L xylose) for 50 hours. Kanamycin was added with a final concentration of 100 μg/mL. Growth was monitored by OD600 (FIG. 17).

[1588] Because pentose intermediates phosphorylated on carbon 5, such as ribulose-5P and xylulose-5P, can be naturally obtained from glucose via PPP pathways, active PGM3 from S. cerevisiae is also suitable to demonstrate in-vivo production of glycolic acid from glucose, in a similar approach. No E. coli MG1655 ΔtktA-ΔtktB cell growth is observed without PGM3.Sc overexpression plasmid. On the other hand, E. coli MG1655 ΔtktA-ΔtktB restored its ability to growth on xylose when the active PGM3 from S. cerevisiae was able to convert D-xylulose-5P and D-ribulose-5P into D-xylulose-1P and D-ribulose-1P, respectively, and so the pentose-1P intermediates converted into glycoaldehyde and G3P by aldolase activity (aldoB on D-xylulose-1P and fucA on D-ribulose-1P).

### Example 3

[1589] Enzymatic assay of D-xylulose-1-phosphate aldolase (aldoB) (Maylay A D, et al. (2002) Arch Biochem Biophys, 408:295-304) and D-ribulose-1-phosphate aldolase (FucA) (Elsinghorst E A, et al. (1994) J Bacteriol, 176:7223-7232) activities were tested according to the scheme in FIG. 18 on their natural substrates, xylulose-1P and ribulose-1P, respectively. The reaction mixture contained HEPES 60 mM, pH 7.5, KCl 60 mM, MgCl₂ 3 mM, NADH 0.25 mM, ATP 4 mM, purified kinase, and aldolase, GPDH at 2 U/mL. Furthermore, the kinases used to produce pentose-1P were fucK (SEQ ID NO: 257)(LeBlanc D J, et al. (1971) Metabolism of D-arabinose: origin of a D-ribulokinase activity in Escherichia coli. J Bacteriol, 106:82-89) for ribulose-1P, and khk-C(SEQ ID NO: 256) (Asipu A, et al. (2003) Properties of normal and mutant recombinant human ketohexokinases and implications for the pathogenesis of essential fructosuria. Diabetes, 52:2426-2432) for xyluolse-1P. Both proteins were tested as previously described for kinases producing pentose-5P.

### HPLC Analysis.

[1590] Pentose, glycolate and glycerol quantifications were determined by high-performance liquid chromatography using Thermo Fisher Scientific system (Courtaboeuf, France) equipped with a RI detector, with a UV detector at 205 nm and a Phenomenex column (Rezex H+) at 50° C. using 2.5 mM H2SO4 as mobile phase at 0.5 mL/min.

### Numbered Embodiments of the Disclosure

[1591] 1. A recombinant microorganism comprising one or more biochemical pathways that produces monoethylene glycol (MEG) or glycolic acid (GA) from one or more hexose feedstock via one or more pentose-5-phosphate intermediate.

[1592] 2. The recombinant microorganism of any one of the preceding embodiments, wherein one or more co-product is co-produced with MEG or GA.

[1593] 3. The recombinant microorganism of any one of the preceding embodiments, wherein the one or more pentose-5-phosphate intermediate is one or more of D-ribose-5-phosphate, D-xylulose-5-phosphate or D-ribulose-5-phosphate.

[1594] 4. The recombinant microorganism of any one of the preceding embodiments, wherein the one or more biochemical pathway comprises at least one enzyme having transketolase activity.

[1595] 5. The recombinant microorganism of any one of the preceding embodiments, wherein the at least one enzyme having transketolase activity is encoded by an amino acid sequence having at least 70% sequence identity, at least 80% sequence identity, or at least 90% sequence identity to tktA or tktB from E. coli.

[1596] 6. The recombinant microorganism of any one of the preceding embodiments, wherein the at least enzyme having transketolase activity comprises tktA or tktB from E. coli.

[1597] 7. The recombinant microorganism of any one of the preceding embodiments, wherein the one or more biochemical pathway comprises at least one enzyme having transaldolase activity.

[1598] 8. The recombinant microorganism of any one of the preceding embodiments, wherein the at least one enzyme having transaldolase activity is encoded by an amino acid sequence having at least 70% sequence identity, at least 80% sequence identity, or at least 90% sequence identity to talA or talB from E. coli. 9. The recombinant microorganism of any one of the preceding embodiments, wherein the at least one enzyme having transaldolase activity is selected from E. coli talA and E. coli talB.

[1599] 10. The recombinant microorganism of any one of the preceding embodiments, wherein the one or more biochemical pathway comprises at least one enzyme having ribulose-5-phosphate 3-epimerase activity.

[1600] 11. The recombinant microorganism of any one of the preceding embodiments, wherein the at least one enzyme having ribulose-5-phosphate 3-epimerase activity is encoded by an amino acid sequence having at least 70% sequence identity, at least 80% sequence identity, or at least 90% sequence identity to rpe from E. coli.

[1601] 12. The recombinant microorganism of any one of the preceding embodiments, wherein the at least one enzyme having ribulose-5-phosphate 3-epimerase activity comprises rpe from E. coli.

[1602] 13. The recombinant microorganism of any one of embodiments 1-12, wherein the one or more biochemical pathway comprises at least one enzyme having ribose-5-phosphate isomerase activity.

[1603] 14. The recombinant microorganism of any one of the preceding embodiments, wherein the at least one enzyme having ribose-5-phosphate isomerase activity is encoded by an amino acid sequence having at least 70% sequence identity, at least 80% sequence identity, or at least 90% sequence identity to rpiA or rpiB from E. coli.

[1604] 15. The recombinant microorganism of any one of the preceding embodiments, wherein the at least one enzyme having ribose-5-phosphate isomerase activity comprises rpiA or rpiB from E. coli.

[1605] 16. The recombinant microorganism of any one of the preceding embodiments, wherein the recombinant microorganism further comprises a deleted or diminished activity in one or more endogenous enzymes selected from glyceraldehyde 3-phosphate dehydrogenase, phosphoglycerate kinase and phosphoglycerate mutase.

[1606] 17. The recombinant microorganism of any one of the preceding embodiments, wherein the glyceraldehyde 3-phosphate dehydrogenase is gapA, the phosphoglycerate kinase is pgk and the phosphoglycerate mutase is gpmA and/or gpmM. 18. The recombinant microorganism of any one of the preceding embodiments, wherein the one or more biochemical pathway comprises at least one enzyme having fructose-6-phosphate phosphoketolase activity.

[1607] 19. The recombinant microorganism of any one of the preceding embodiments, wherein the at least one enzyme having fructose-6-phosphate phosphoketolase activity is encoded by an amino acid sequence having at least 70% sequence identity, at least 80% sequence identity, or at least 90% sequence identity to an enzyme having fructose-6-phosphate phosphoketolase activity selected from the group consisting of Bifidobacterium dentium BDP 1006, Bifidobacterium lactis xfp, Lactobacillus paraplantarum xpkA and Bifidobacterium breve xfp.

[1608] 20. The recombinant microorganism of any one of the preceding embodiments, wherein the at least one enzyme having fructose-6-phosphate phosphoketolase activity is selected from the group consisting of Bifidobacterium dentium BDP 1006, Bifidobacterium lactis xfp, Lactobacillus paraplantarum xpkA and Bifidobacterium breve xfp.

[1609] 21. The recombinant microorganism of any one of the preceding embodiments, wherein the one or more biochemical pathway comprises at least one enzyme having phosphate acetyltransferase activity.

[1610] 22. The recombinant microorganism of any one of the preceding embodiments, wherein the at least one enzyme having phosphate acetyltransferase activity is encoded by an amino acid sequence having at least 70% sequence identity, at least 80% sequence identity, or at least 90% sequence identity to an enzyme having phosphate acetyltransferase activity selected from E. coli pta and Clostridium acetobutylicum pta.

[1611] 23. The recombinant microorganism of any one of the preceding embodiments, wherein the at least one enzyme having phosphate acetyltransferase activity is selected from E. coli pta and Clostridium acetobutylicum pta.

[1612] 24. The recombinant microorganism of any one of the preceding embodiments or 18-23, wherein the recombinant microorganism further comprises a deleted or diminished activity in an endogenous 6-phosphofructokinase enzyme.

[1613] 25. The recombinant microorganism of any one of the preceding embodiments, wherein the 6-phosphofructokinase is pfkAB.

[1614] 26. The recombinant microorganism of any one of the preceding embodiments, wherein the one or more biochemical pathway comprises at least one enzyme having pentose phosphatase activity.

[1615] 27. The recombinant microorganism of any one of the preceding embodiments, wherein the at least one enzyme having pentose phosphatase activity is selected from one or more of an enzyme having D-pentose-5-phosphatase activity, an enzyme having D-xylulose-5-phosphatase activity, an enzyme having D-ribose-5-phosphatase activity, and an enzyme having D-ribulose-5-phosphatase activity.

[1616] 28. The recombinant microorganism of any one of the preceding embodiments, wherein the at least one enzyme having D-pentose-5-phosphatase activity is encoded by an amino acid sequence having at least 70% sequence identity, at least 80% sequence identity, or at least 90% sequence identity to an enzyme having D-pentose-5-phosphatase activity selected from the group consisting of E. coli phoA, E. coli yfbT and E. coli yidA.

[1617] 29. The recombinant microorganism of any one of the preceding embodiments, wherein the at least one enzyme having D-pentose-5-phosphatase activity is selected from the group consisting of E. coli phoA, E. coli yfbT and E. coli yidA.

[1618] 30. The recombinant microorganism of any one of the preceding embodiments, wherein the at least one enzyme having D-xylulose-5-phosphatase activity is encoded by an amino acid sequence having at least 70% sequence identity, at least 80% sequence identity, or at least 90% sequence identity to Bacillus subtilis araL.

[1619] 31. The recombinant microorganism of any one of the preceding embodiments, wherein the at least one enzyme having D-xylulose-5-phosphatase activity is Bacillus subtilis araL.

[1620] 32. The recombinant microorganism of any one of the preceding embodiments, wherein the at least one enzyme having D-ribose-5-phosphatase activity is encoded by an amino acid sequence having at least 70% sequence identity, at least 80% sequence identity, or at least 90% sequence identity to an enzyme having D-ribose-5-phosphatase activity selected from the group consisting of Arabidopsis thaliana SGPP, Pseudomonas fluorescens PFLU 2693, and E. coli ybiV.

[1621] 33. The recombinant microorganism of any one of the preceding embodiments, wherein the at least one enzyme having D-ribose-5-phosphatase activity is selected from the group consisting of Arabidopsis thaliana SGPP, Pseudomonas fluorescens PFLU 2693, and E. coli ybiV.

[1622] 34. The recombinant microorganism of any one of the preceding embodiments, wherein the at least one enzyme having D-ribulose-5-phosphatase activity is encoded by an amino acid sequence having at least 70% sequence identity, at least 80% sequence identity, or at least 90% sequence identity to Plasmodium falciparum PF10_0325.

[1623] 35. The recombinant microorganism of any one of the preceding embodiments, wherein the at least one enzyme having D-ribulose-5-phosphatase activity is Plasmodium falciparum PF10_0325.

[1624] 36. The recombinant microorganism of any one of any one of the preceding embodiments, wherein the one or more biochemical pathway comprises at least one enzyme having arabitol phosphate dehydrogenase activity.

[1625] 37. The recombinant microorganism of any one of the preceding embodiments, wherein the at least one enzyme having arabitol phosphate dehydrogenase activity is selected from one or more of an enzyme having D-arabitol 1-phosphate 4-dehydrogenase activity, an enzyme having D-arabitol 5-phosphate 2-dehydrogenase activity, an enzyme having D-arabitol 1-phosphate 2-dehydrogenase activity and an enzyme having D-arabitol 5-phosphate 4-dehydrogenase activity.

[1626] 38. The recombinant microorganism of any one of the preceding embodiments, wherein the at least one enzyme having D-arabitol 1-phosphate 4-dehydrogenase activity is encoded by an amino acid sequence having at least 70% sequence identity, at least 80% sequence identity, or at least 90% sequence identity to APDH from Enterococcus avium.

[1627] 39. The recombinant microorganism of any one of the preceding embodiments, wherein the at least one enzyme having D-arabitol 1-phosphate 4-dehydrogenase activity is APDH from Enterococcus avium.

[1628] 40. The recombinant microorganism of any one of the preceding embodiments, wherein the at least one enzyme having D-arabitol 5-phosphate 2-dehydrogenase activity is encoded by an amino acid sequence having at least 70% sequence identity, at least 80% sequence identity, or at least 90% sequence identity to APDH from Enterococcus avium. 41. The recombinant microorganism of any one of the preceding embodiments, wherein the at least one enzyme having D-arabitol 5-phosphate 2-dehydrogenase activity is APDH from Enterococcus avium.

[1629] 42. The recombinant microorganism of any one of the preceding embodiments, wherein the at least one enzyme having D-arabitol 1-phosphate 2-dehydrogenase activity is encoded by an amino acid sequence having at least 70% sequence identity, at least 80% sequence identity, or at least 90% sequence identity to an enzyme having D-arabitol 1-phosphate 2-dehydrogenase activity selected from the group consisting of Candida albicans ARD1, Candida tropicalis ARD1, Scheffersomyces stipitis ARDH, Bacillus subtilis egsA (araM), Aeropyrum pernix egsA, E. coli gpsA and Saccharomyces cerevisiae GPD1.

[1630] 43. The recombinant microorganism of any one of the preceding embodiments, wherein the at least one enzyme having D-arabitol 1-phosphate 2-dehydrogenase activity is selected from the group consisting of Candida albicans ARD1, Candida tropicalis ARD1, Scheffersomyces stipitis ARDH, Bacillus subtilis egsA (araM), Aeropyrum pernix egsA, E. coli gpsA and Saccharomyces cerevisiae GPD1.

[1631] 44. The recombinant microorganism of any one of the preceding embodiments, wherein the at least one enzyme having D-arabitol 5-phosphate 4-dehydrogenase activity is encoded by an amino acid sequence having at least 70% sequence identity, at least 80% sequence identity, or at least 90% sequence identity to an enzyme having D-arabitol 5-phosphate 4-dehydrogenase activity selected from the group consisting of Pseudomonas fluorescens mtlD, Klebsiella pneumoniae dalD, Ralstonia solanacearum dalD, Bacillus subtilis egsA (araM), Aeropyrum pernix egsA, E. coli gpsA and Saccharomyces cerevisiae GPD1.

[1632] 45. The recombinant microorganism of any one of the preceding embodiments, wherein the at least one enzyme having D-arabitol 5-phosphate 4-dehydrogenase activity is selected from the group consisting of Pseudomonas fluorescens mtlD, Klebsiella pneumoniae dalD, Ralstonia solanacearum dalD, Bacillus subtilis egsA (araM), Aeropyrum pernix egsA, E. coli gpsA and Saccharomyces cerevisiae GPD1.

[1633] 46. The recombinant microorganism of any one of the preceding embodiments, wherein the one or more biochemical pathway comprises at least one enzyme having phosphopentomutase activity.

[1634] 47. The recombinant microorganism of any one of the preceding embodiments, wherein the at least one enzyme having phosphopentomutase activity is encoded by an amino acid sequence having at least 70% sequence identity, at least 80% sequence identity, or at least 90% sequence identity to an enzyme having phosphopentomutase activity selected from the group consisting of E. coli deoB, E. coli pgm, Bacillus subtilis pgcA, Lactococcus lactis pgmB, E. coli ycjU, Pseudomonas aeruginosa algC, and E. coli cpsG.

[1635] 48. The recombinant microorganism of any one of the preceding embodiments, wherein the at least one enzyme having phosphopentomutase activity is selected from the group consisting of E. coli deoB, E. coli pgm, Bacillus subtilis pgcA, Lactococcus lactis pgmB, E. coli ycjU, Pseudomonas aeruginosa algC, and E. coli cpsG.

[1636] 49. The recombinant microorganism of any one of any one of the preceding embodiments, wherein the recombinant microorganism further comprises a deleted or diminished activity in one or more endogenous enzymes selected from glucose 6-phosphate-1-dehydrogenase, 6-phosphogluconolactonase and 6-phosphogluconate dehydrogenase.

[1637] 50. The recombinant microorganism of any one of the preceding embodiments, wherein the glucose 6-phosphate-1-dehydrogenase is zwf, the 6-phosphogluconolactonase is pgl and the 6-phosphogluconate dehydrogenase is gnd.

[1638] 51. The recombinant microorganism of any one of the preceding embodiments, wherein the one or more co-product is selected from acetone, isopropanol, propene, isobutene and one or more serine pathway compounds.

[1639] 52. The recombinant microorganism of any one of the preceding embodiments, wherein the one or more serine pathway compounds is selected from serine, glycine, monoethanolamine (MEA) and ethylenediamine (EDA).

[1640] 53. The recombinant microorganism of any one of the preceding embodiments, wherein the one or more hexose feedstock is selected from glucose or oligomers of glucose thereof.

[1641] 54. The recombinant microorganism of any one of the preceding embodiments, wherein the oligomers of glucose are selected from fructose, sucrose, starch, cellobiose, maltose, lactose and cellulose.

[1642] 55. The recombinant microorganism of any one of the preceding embodiments, wherein the expression of an enzyme having transketolase activity or an enzyme having fructose-6-phosphate phosphoketolase activity enables a lossless conversion of one or more hexose feedstock to the one or more pentose-5-phosphate intermediate.

[1643] 56. The recombinant microorganism of any one of the preceding embodiments, wherein MEG or GA is produced through the conversion of glycolaldehyde in a C2 pathway and through the conversion of dihydroxyacetone phosphate (DHAP) or pyruvate in a C3 pathway.

[1644] 57. The recombinant microorganism of any one of the preceding embodiments, wherein GA is produced by the oxidation of glycolaldehyde by a glycolaldehyde dehydrogenase.

[1645] 58. The recombinant microorganism of any one of the preceding embodiments, wherein one or more enzyme for the production of MEG or GA through the conversion of DHAP or pyruvate in a C3 pathway are selected from one or more enzyme having an activity selected from a 3-phosphoglycerate dehydrogenase activity, a phosphoserine aminotransferase activity, a 3-phosphohydroxypyruvate phosphatase activity, a phosphoserine phosphatase activity, a serine transaminase activity, a hydroxypyruvate decarboxylase activity, a 3-phosphohydroxypyruvate reductase activity, a glycolaldehyde reductase activity, a glycolaldehyde dehydrogenase activity, a serine oxidoreductase (deaminating) or serine-pyruvate aminotransferase activity, a serine decarboxylase activity, an ethanolamine aminotransferase or ethanolamine oxidoreductase (deaminating) activity, a glycerate decarboxylase activity, a hydroxypyruvate reductase activity, a 3-phosphoglycerate phosphatase activity, a 2-phosphoglycerate phosphatase activity, a glycerate 3-kinase activity, and a glycerate 2-kinase activity.

[1646] 59. The recombinant microorganism of any one of the preceding embodiments, wherein MEG or GA is produced through the conversion of glycolaldehyde in a C2 pathway and one or more co-product is produced through the conversion of dihydroxyacetone phosphate (DHAP) or pyruvate in a C3 pathway.

[1647] 60. The recombinant microorganism of any one of the preceding embodiments, wherein one or more enzyme for the production of one or more co-product through the conversion of DHAP or pyruvate in a C3 pathway are selected from one or more enzyme having an activity selected from a thiolase or acetyl coenzyme A acetyltransferase activity, an acetyl-CoA:acetoacetate transferase or acetate:acetoacetyl-CoA hydrolase activity, and an acetoacetate decarboxylase activity, and wherein the one or more co-product comprises acetone.

[1648] 61. The recombinant microorganism of any one of the preceding embodiments, wherein one or more enzyme for the production of one or more co-product through the conversion of DHAP or pyruvate in a C3 pathway are selected from one or more enzyme having an activity selected from a thiolase or acetyl coenzyme A acetyltransferase activity, an acetyl-CoA:acetoacetate transferase or acetate:acetoacetyl-CoA hydrolase activity, an acetoacetate decarboxylase activity, and a secondary alcohol dehydrogenase activity, and wherein the one or more co-product comprises isopropanol.

[1649] 62. The recombinant microorganism of any one of the preceding embodiments, wherein one or more enzyme for the production of one or more co-product through the conversion of DHAP or pyruvate in a C3 pathway are selected from one or more enzyme having an activity selected from a thiolase or acetyl coenzyme A acetyltransferase activity, an acetyl-CoA:acetoacetate transferase or acetate:acetoacetyl-CoA hydrolase activity, an acetoacetate decarboxylase activity, a secondary alcohol dehydrogenase activity, and a dehydratase activity, and wherein the one or more co-product comprises propene.

[1650] 63. The method of any one of the preceding embodiments, wherein one or more enzyme for the production of one or more co-product through the conversion of DHAP or pyruvate in a C3 pathway are selected from one or more enzyme having an activity selected from a thiolase or acetyl coenzyme A acetyltransferase activity, an acetyl-CoA:acetoacetate transferase or acetate:acetoacetyl-CoA hydrolase activity, an acetoacetate decarboxylase activity, a 3-hydroxyisovalerate (3HIV) synthase activity, a hydroxymethylglutaryl-CoA synthase activity, a methylglutaconyl-CoA hydratase activity, a methylcrotonyl-CoA carboxylase activity, a methylcrotonyl-CoA hydratase activity, a 3-hydroxyisovaleryl-CoA thioesterase activity, a 3HIV kinase activity, a 3HIV-3-phosphate decarboxylase activity, and a 3HIV decarboxylase activity, and wherein the one or more co-product comprises isobutene.

[1651] 64. The method of any one of the preceding embodiments, wherein one or more enzyme for the production of one or more co-product through the conversion of DHAP or pyruvate in a C3 pathway are selected from one or more enzyme having an activity selected from a 3-phosphoglycerate dehydrogenase activity, a phosphoserine aminotransferase activity, a 3-phosphohydroxypyruvate phosphatase activity, a phosphoserine phosphatase activity, a serine oxidoreductase (deaminating) or serine-pyruvate aminotransferase activity, a hydroxypyruvate reductase activity, a 3-phosphoglycerate phosphatase activity, a 2-phosphoglycerate phosphatase activity, a glycerate 3-kinase activity, and a glycerate 2-kinase activity, and wherein the one or more co-product comprises L-serine.

[1652] 65. The method of any one of the preceding embodiments, wherein one or more enzyme for the production of one or more co-product through the conversion of DHAP or pyruvate in a C3 pathway are selected from one or more enzyme having an activity selected from a serine hydroxymethyltransferase activity, a transferase activity, a formaldehyde dehydrogenase activity, a formate dehydrogenase activity, an activity associated with glycine cleavage system, a 3-phosphoglycerate dehydrogenase activity, a phosphoserine aminotransferase activity, a 3-phosphohydroxypyruvate phosphatase activity, a phosphoserine phosphatase activity, a serine transaminase activity, a hydroxypyruvate decarboxylase activity, a serine oxidoreductase (deaminating) activity, a serine decarboxylase activity, an ethanolamine aminotransferase or ethanolamine oxidoreductase (deaminating) activity, a hydroxypyruvate reductase activity, a 3-phosphoglycerate phosphatase activity, a 2-phosphoglycerate phosphatase activity, a glycerate 3-kinase activity, a glycerate 2-kinase activity, a glycolaldehyde dehydrogenase activity, a glycolate dehydrogenase activity, an alanine-glyoxylate aminotransferase activity, an alanine transaminase activity, an NAD(P)H dependent glutamate dehydrogenase activity, and wherein the one or more co-product comprises glycine.

[1653] 66. The method of any one of the preceding embodiments, wherein the activity associated with glycine cleavage system comprise an enzyme or protein selected from a glycine decarboxylase (P protein), an aminomethyltransferase (T protein), a dihydrolipoamide dehydrogenase (L protein), and an H protein.

[1654] 67. The method of any one of the preceding embodiments, wherein one or more enzyme for the production of one or more co-product through the conversion of DHAP or pyruvate in a C3 pathway are selected from one or more enzyme having an activity selected from a 3-phosphoglycerate dehydrogenase activity, a phosphoserine aminotransferase activity, a 3-phosphohydroxypyruvate phosphatase activity, a phosphoserine phosphatase activity, a transaminase activity, a hydroxypyruvate decarboxylase activity, a serine oxidoreductase (deaminating) or serine-pyruvate aminotransferase activity, a serine decarboxylase activity, a hydroxypyruvate reductase activity, a 3-phosphoglycerate phosphatase activity, a 2-phosphoglycerate phosphatase activity, a glycerate 3-kinase activity, a glycerate 2-kinase activity, an acetaldehyde dehydrogenase activity, and an ethanolamine ammonia lyase activity, and wherein the one or more co-product comprises monoethanolamine (MEA).

[1655] 68. The method of any one of the preceding embodiments, wherein one or more enzyme for the production of one or more co-product through the conversion of DHAP or pyruvate in a C3 pathway are selected from one or more enzyme having an activity selected from a serine dehydrogenase activity, a 2-aminomalonate semialdehyde decarboxylase activity, an aminoacetaldehyde transaminase activity, a 2-aminomalonate semialdehyde transaminase activity, a 2,3-diaminopropanoate decarboxylase activity, a serine decarboxylase activity, an ethanolamine dehydrogenase activity, a serine hydroxymethyltransferase activity, an aldehyde oxidase activity, an N-acetyl transferase or O-acetyl transferase activity, an N-acetylserine dehydrogenase activity, a transaminase activity, a deacetylase activity, a serine aminase activity, and a 2,3-diaminopropanoate ammonia lyase activity, and wherein the one or more co-product comprises ethylenediamine (EDA).

[1656] 69. The recombinant microorganism of any one of the preceding embodiments, wherein one or more enzyme for the production of MEG or GA from glycolaldehyde in a C2 pathway are selected from one or more enzyme having an activity selected from a D-tagatose 3-epimerase activity, a D-ribulokinase activity, a D-ribulose-1-phosphate aldolase activity, a D-xylulose 1-kinase activity, a D-xylulose-1-phosphate aldolase activity, a xylose reductase or aldose reductase activity, a xylitol dehydrogenase activity, a xylose isomerase activity, a xylose dehydrogenase activity, a xylonolactonase activity, a xylonate dehydrogenase activity, a 2-keto-3-deoxy-D-pentonate aldolase activity, a glycolaldehyde reductase activity and a glycolaldehyde dehydrogenase activity.

[1657] 70. The recombinant microorganism of any one of the preceding embodiments, wherein the recombinant microorganism further comprises one or more modifications to diminish or delete activity in a glycolaldehyde dehydrogenase, a lactate dehydrogenase, a xylose isomerase, a xylulose kinase or combination thereof.

[1658] 71. The recombinant microorganism of any one of the preceding embodiments, wherein at least a portion of the excess NADH produced in the C3 pathway is used as a source of reducing equivalents in the C2 pathway.

[1659] 72. The recombinant microorganism of any one of the preceding embodiments, wherein at least a portion of the excess NADH produced in the C3 pathway is used to produce ATP.

[1660] 73. The recombinant microorganism of any one of the preceding embodiments, wherein excess biomass formation is minimized and production of MEG (or GA) or MEG (or GA) and one or more co-product is maximized.

[1661] 74. A method of producing MEG or glycolic acid (GA) using a recombinant microorganism of any of the preceding claims, wherein the method comprises cultivating the recombinant microorganism in a culture medium containing one or more hexose feedstock providing a carbon source until the MEG or GA is produced.

[1662] 75. The method of any one of the preceding embodiments, wherein one or more co-product is co-produced with MEG or GA.

[1663] 76. The method of any one of the preceding embodiments, wherein the one or more co-product is selected from acetone, isopropanol, propene, isobutene and one or more serine pathway compound.

[1664] 77. The method of any one of the preceding embodiments, wherein the one or more serine pathway compound is selected from serine, glycine, monoethanolamine (MEA) and ethylenediamine (EDA).

[1665] 78. A method of producing a recombinant microorganism that produces or accumulates MEG or glycolic acid (GA) from one or more exogenous hexose feedstock via one or more pentose-5-phosphate intermediate, comprising:

[1666] introducing into the recombinant microorganism one or more enzyme for the conversion of the one or more hexose feedstock to the one or more pentose-5-phosphate intermediate;

[1667] introducing into the recombinant microorganism one or more enzyme for the conversion of the one or more pentose-5-phosphate intermediate to one or more pentose or pentose-1-phosphate intermediate;

[1668] introducing into the recombinant microorganism a C2 pathway comprising one or more enzyme for the production of MEG or GA from glycolaldehyde; and

[1669] introducing into the recombinant microorganism a C3 pathway comprising one or more enzyme for the production of MEG or GA derived from DHAP or pyruvate; and

[1670] culturing the recombinant microorganism in a culture medium containing the one or more hexose feedstock to produce or accumulate MEG or GA,

[1671] wherein glycolaldehyde and DHAP (or pyruvate) are intermediates produced in the C2 pathway, and wherein MEG or GA are produced in both the C2 and C3 pathways.

[1672] 79. A method of producing a recombinant microorganism that produces or accumulates MEG or glycolic acid (GA) and one or more co-product from one or more exogenous hexose feedstock via one or more pentose-5-phosphate intermediate, comprising:

[1673] introducing into the recombinant microorganism one or more enzyme for the conversion of the one or more hexose feedstock to the one or more pentose-5-phosphate intermediate;

[1674] introducing into the recombinant microorganism one or more enzyme for the conversion of the one or more pentose-5-phosphate intermediate to one or more pentose or pentose-1-phosphate intermediate;

[1675] introducing into the recombinant microorganism a C2 pathway comprising one or more enzyme for the production of MEG or GA from glycolaldehyde; and

[1676] introducing into the recombinant microorganism a C3 pathway comprising one or more enzyme for the production of one or more co-product derived from DHAP or pyruvate; and

[1677] culturing the recombinant microorganism in a culture medium containing the one or more hexose feedstock to produce or accumulate MEG or GA and one or more co-product, wherein glycolaldehyde and DHAP (or pyruvate) are intermediates produced in the C2 pathway, and wherein MEG or GA is produced in the C2 pathway and the one or more co-product is produced in the C3 pathway.

[1678] 80. The method of any one of the preceding embodiments, wherein the glycolaldehyde is oxidized to glycolic acid by a glycoladehyde dehydrogenase.

[1679] 81. The method of any one of the preceding embodiments, wherein the one or more enzyme for the conversion of the one or more hexose feedstock to the one or more pentose-5-phosphate intermediate are selected from one or more enzyme having a transketolase activity, a transaldolase activity, a ribulose-5-phosphate 3-epimerase activity, and a ribose-5-phosphate isomerase activity.

[1680] 82. The method of any one of the preceding embodiments, wherein the method further comprises introducing into the recombinant microorganism one or more modifications to diminish or delete activity in one or more endogenous enzymes selected from glyceraldehyde 3-phosphate dehydrogenase (gapA), phosphoglycerate kinase (pgk) and phosphoglycerate mutase (gpmA and/or gpmM).

[1681] 83. The method of any one of the preceding embodiments, wherein the one or more enzyme for the conversion of the one or more hexose feedstock to the one or more pentose-5-phosphate intermediate are selected from one or more enzyme having a fructose-6-phosphate phosphoketolase activity, a phosphate acetyltransferase activity, a transketolase activity, a transaldolase activity, a ribulose-5-phosphate 3-epimerase activity, and a ribose-5-phosphate isomerase activity.

[1682] 84. The method of any one of the preceding embodiments, wherein the method further comprises introducing into the recombinant microorganism one or more modifications to diminish or delete activity in an endogenous 6-phosphofructokinase (pfkAB) enzyme.

[1683] 85. The method of any one of the preceding embodiments, wherein the method further comprises: introducing into the recombinant microorganism one or more modifications to diminish or delete activity in one or more endogenous enzymes selected from glucose 6-phosphate-1-dehydrogenase, 6-phosphogluconolactonase, and 6-phosphogluconate dehydrogenase.

[1684] 86. The method of any one of the preceding embodiments, wherein the glucose 6-phosphate-1-dehydrogenase is zwf, the 6-phosphogluconolactonase is pgl, and the 6-phosphogluconate dehydrogenase is gnd.

[1685] 87. The method of any one of the preceding embodiments, wherein the one or more enzyme for the conversion of the one or more pentose-5-phosphate intermediate to one or more pentose or pentose-1-phosphate intermediate are selected from one or more enzyme having a pentose phosphatase activity, a D-ribulose-5-phosphatase activity, a D-ribose-5-phosphatase activity, a D-ribose isomerase activity, an arabitol phosphate dehydrogenase activity, and a phosphopentomutase activity.

[1686] 88. The method of any one of the preceding embodiments, wherein one or more enzyme for the production of MEG or GA derived from DHAP or pyruvate in the C3 pathway are selected from one or more enzyme having an activity selected from a 3-phosphoglycerate dehydrogenase activity, a phosphoserine aminotransferase activity, a 3-phosphohydroxypyruvate phosphatase activity, a phosphoserine phosphatase activity, a serine transaminase activity, a hydroxypyruvate decarboxylase activity, a 3-phosphohydroxypyruvate reductase activity, a glycolaldehyde reductase activity, a glycolaldehyde dehydrogenase activity, a serine oxidoreductase (deaminating) or serine-pyruvate aminotransferase activity, a serine decarboxylase activity, an ethanolamine aminotransferase or ethanolamine oxidoreductase (deaminating) activity, a glycerate decarboxylase activity, a hydroxypyruvate reductase activity, a 3-phosphoglycerate phosphatase activity, a 2-phosphoglycerate phosphatase activity, a glycerate 3-kinase activity, and a glycerate 2-kinase activity.

[1687] 89. The method of any one of the preceding embodiments, wherein one or more enzyme for the production of one or more co-product derived from DHAP or pyruvate in the C3 pathway are selected from one or more enzyme having an activity selected from a thiolase or acetyl coenzyme A acetyltransferase activity, an acetyl-CoA:acetoacetate transferase or acetate:acetoacetyl-CoA hydrolase activity, and an acetoacetate decarboxylase activity, and wherein the one or more co-product comprises acetone.

[1688] 90. The method of any one of the preceding embodiments, wherein one or more enzyme for the production of one or more co-product derived from DHAP or pyruvate in the C3 pathway are selected from one or more enzyme having an activity selected from a thiolase or acetyl coenzyme A acetyltransferase activity, an acetyl-CoA:acetoacetate transferase or acetate:acetoacetyl-CoA hydrolase activity, an acetoacetate decarboxylase activity, and a secondary alcohol dehydrogenase activity, and wherein the one or more co-product comprises isopropanol.

[1689] 91. The method of any one of the preceding embodiments, wherein one or more enzyme for the production of one or more co-product derived from DHAP or pyruvate in the C3 pathway are selected from one or more enzyme having an activity selected from a thiolase or acetyl coenzyme A acetyltransferase activity, an acetyl-CoA:acetoacetate transferase or acetate:acetoacetyl-CoA hydrolase activity, an acetoacetate decarboxylase activity, a secondary alcohol dehydrogenase activity, and a dehydratase activity, and wherein the one or more co-product comprises propene.

[1690] 92. The method of any one of the preceding embodiments, wherein one or more enzyme for the production of one or more co-product derived from DHAP or pyruvate in the C3 pathway are selected from one or more enzyme having an activity selected from a thiolase or acetyl coenzyme A acetyltransferase activity, an acetyl-CoA:acetoacetate transferase or acetate:acetoacetyl-CoA hydrolase activity, an acetoacetate decarboxylase activity, a 3-hydroxyisovalerate (3HIV) synthase activity, a hydroxymethylglutaryl-CoA synthase activity, a methylglutaconyl-CoA hydratase activity, a methylcrotonyl-CoA carboxylase activity, a methylcrotonyl-CoA hydratase activity, a 3-hydroxyisovaleryl-CoA thioesterase activity, a 3HIV kinase activity, a 3HIV-3-phosphate decarboxylase activity, and a 3HIV decarboxylase activity, and wherein the one or more co-product comprises isobutene.

[1691] 93. The method of any one of the preceding embodiments, wherein one or more enzyme for the production of one or more co-product derived from DHAP or pyruvate in the C3 pathway are selected from one or more enzyme having an activity selected from a 3-phosphoglycerate dehydrogenase activity, a phosphoserine aminotransferase activity, a 3-phosphohydroxypyruvate phosphatase activity, a phosphoserine phosphatase activity, a serine oxidoreductase (deaminating) or serine-pyruvate aminotransferase activity, a hydroxypyruvate reductase activity, a 3-phosphoglycerate phosphatase activity, a 2-phosphoglycerate phosphatase activity, a glycerate 3-kinase activity, and a glycerate 2-kinase activity, and wherein the one or more co-product comprises L-serine.

[1692] 94. The method of any one of the preceding embodiments, wherein one or more enzyme for the production of one or more co-product derived from DHAP or pyruvate in the C3 pathway are selected from one or more enzyme having an activity selected from a serine hydroxymethyltransferase activity, a transferase activity, a formaldehyde dehydrogenase activity, a formate dehydrogenase activity, an activity associated with glycine cleavage system, a 3-phosphoglycerate dehydrogenase activity, a phosphoserine aminotransferase activity, a 3-phosphohydroxypyruvate phosphatase activity, a phosphoserine phosphatase activity, a serine transaminase activity, a hydroxypyruvate decarboxylase activity, a serine oxidoreductase (deaminating) activity, a serine decarboxylase activity, an ethanolamine aminotransferase or ethanolamine oxidoreductase (deaminating) activity, a hydroxypyruvate reductase activity, a 3-phosphoglycerate phosphatase activity, a 2-phosphoglycerate phosphatase activity, a glycerate 3-kinase activity, a glycerate 2-kinase activity, a glycolaldehyde dehydrogenase activity, a glycolate dehydrogenase activity, an alanine-glyoxylate aminotransferase activity, an alanine transaminase activity, and an NAD(P)H dependent glutamate dehydrogenase activity, and wherein the one or more co-product comprises glycine.

[1693] 95. The method of any one of the preceding embodiments, wherein the activity associated with glycine cleavage system comprise an enzyme or protein selected from a glycine decarboxylase (P protein), an aminomethyltransferase (T protein), a dihydrolipoamide dehydrogenase (L protein), and an H protein.

[1694] 96. The method of any one of the preceding embodiments, wherein one or more enzyme for the production of one or more co-product derived from DHAP or pyruvate in the C3 pathway are selected from one or more enzyme having an activity selected from 3-phosphoglycerate dehydrogenase activity, a phosphoserine aminotransferase activity, a 3-phosphohydroxypyruvate phosphatase activity, a phosphoserine phosphatase activity, a transaminase activity, a hydroxypyruvate decarboxylase activity, a serine oxidoreductase (deaminating) or serine-pyruvate aminotransferase activity, a serine decarboxylase activity, a hydroxypyruvate reductase activity, a 3-phosphoglycerate phosphatase activity, a 2-phosphoglycerate phosphatase activity, a glycerate 3-kinase activity, a glycerate 2-kinase activity, an acetaldehyde dehydrogenase activity, and an ethanolamine ammonia lyase activity, and wherein the one or more co-product comprises monoethanolamine (MEA).

[1695] 97. The method of any one of the preceding embodiments, wherein one or more enzyme for the production of one or more co-product derived from DHAP or pyruvate in the C3 pathway are selected from one or more enzyme having an activity selected from a serine dehydrogenase activity, a 2-aminomalonate semialdehyde decarboxylase activity, an aminoacetaldehyde transaminase activity, a 2-aminomalonate semialdehyde transaminase activity, a 2,3-diaminopropanoate decarboxylase activity, a serine decarboxylase activity, an ethanolamine dehydrogenase activity, a serine hydroxymethyltransferase activity, an aldehyde oxidase activity, an N-acetyl transferase or O-acetyl transferase activity, an N-acetylserine dehydrogenase activity, a transaminase activity, a deacetylase activity, a serine aminase activity, and a 2,3-diaminopropanoate ammonia lyase activity, and wherein the one or more co-product comprises ethylenediamine (EDA).

[1696] 98. The method of any one of the preceding embodiments, wherein one or more enzyme for the production of MEG or GA in the C2 pathway are selected from one or more enzyme having an activity selected from a D-tagatose 3-epimerase activity, a D-ribulokinase activity, a D-ribulose-1-phosphate aldolase activity, a D-xylulose 1-kinase activity, a D-xylulose-1-phosphate aldolase activity, a xylose reductase or aldose reductase activity, a xylitol dehydrogenase activity, a xylose isomerase activity, a xylose dehydrogenase activity, a xylonolactonase activity, a xylonate dehydrogenase activity, a 2-keto-3-deoxy-D-pentonate aldolase activity, a glycolaldehyde reductase activity and a glycolaldehyde dehydrogenase activity.

[1697] 99. The method of any one of the preceding embodiments, wherein the method further comprises: introducing into the recombinant microorganism one or more modifications to diminish or delete activity in a glycolaldehyde dehydrogenase, a lactate dehydrogenase, a xylose isomerase, xylulose kinase or combination thereof.

[1698] 100. A recombinant microorganism comprising one or more biochemical pathway that produces monoethylene glycol (MEG) or glycolic acid (GA) from one or more hexose feedstock via one or more pentose-5-phosphate intermediate.

[1699] 101. The recombinant microorganism of any one of the preceding embodiments, wherein one or more co-product is co-produced with MEG or GA.

[1700] 102. The recombinant microorganism of any one of the preceding embodiments, wherein the one or more pentose-5-phosphate intermediate is one or more of D-ribose-5-phosphate, D-xylulose-5-phosphate or D-ribulose-5-phosphate.

[1701] 103. The recombinant microorganism of any one of the preceding embodiments, wherein the one or more biochemical pathway comprises expression of at least one enzyme having transketolase activity.

[1702] 104. The recombinant microorganism of any one of the preceding embodiments, wherein the at least one enzyme having transketolase activity is encoded by an amino acid sequence having at least 70% sequence identity, at least 80% sequence identity, or at least 90% sequence identity to tktA tktB from E. coli.

[1703] 105. The recombinant microorganism of any one of the preceding embodiments, wherein the one or more biochemical pathway comprises expression of at least one enzyme having transaldolase activity.

[1704] 106. The recombinant microorganism of any one of the preceding embodiments, wherein the at least one enzyme having transaldolase activity is encoded by an amino acid sequence having at least 70% sequence identity, at least 80% sequence identity, or at least 90% sequence identity to talB or talB from E. coli.

[1705] 107. The recombinant microorganism of any one of the preceding embodiments, wherein the one or more biochemical pathway comprises expression of at least one enzyme having ribulose-5-phosphate 3-epimerase activity.

[1706] 108. The recombinant microorganism of any one of the preceding embodiments, wherein the at least one enzyme having ribulose-5-phosphate 3-epimerase activity is encoded by an amino acid sequence having at least 70% sequence identity, at least 80% sequence identity, or at least 90% sequence identity to rpe from E. coli.

[1707] 109. The recombinant microorganism of any one of the preceding embodiments, wherein the one or more biochemical pathway comprises expression of at least one enzyme having ribose-5-phosphate isomerase activity.

[1708] 110. The recombinant microorganism of any one of the preceding embodiments, wherein the at least one enzyme having ribose-5-phosphate isomerase activity is encoded by an amino acid sequence having at least 70% sequence identity, at least 80% sequence identity, or at least 90% sequence identity to rpiA or rpiB from E. coli.

[1709] 111. The recombinant microorganism of any one of the preceding embodiments, wherein the recombinant microorganism further comprises a deleted or diminished activity in at least one endogenous enzyme selected from glyceraldehyde 3-phosphate dehydrogenase, phosphoglycerate kinase and/or phosphoglycerate mutase.

[1710] 112. The recombinant microorganism of any one of the preceding embodiments, wherein the one or more biochemical pathway comprises expression of at least one enzyme having fructose-6-phosphate phosphoketolase activity.

[1711] 113. The recombinant microorganism of any one of the preceding embodiments, wherein the at least one enzyme having fructose-6-phosphate phosphoketolase activity is encoded by an amino acid sequence having at least 70% sequence identity, at least 80% sequence identity, or at least 90% sequence identity to an enzyme having fructose-6-phosphate phosphoketolase activity selected from the group consisting of Bifidobacterium dentium BDP 1006, Bifidobacterium lactis xfp, Lactobacillus paraplantarum xpkA and Bifidobacterium breve xfp.

[1712] 114. The recombinant microorganism of any one of the preceding embodiments, wherein the one or more biochemical pathway comprises expression of at least one enzyme having phosphate acetyltransferase activity.

[1713] 115. The recombinant microorganism of any one of the preceding embodiments, wherein the at least one enzyme having phosphate acetyltransferase activity is encoded by an amino acid sequence having at least 70% sequence identity, at least 80% sequence identity, or at least 90% sequence identity to an enzyme having phosphate acetyltransferase activity selected from E. coli pta and Clostridium acetobutylicum pta.

[1714] 116. The recombinant microorganism of any one of the preceding embodiments, wherein the recombinant microorganism further comprises a deleted or diminished activity in an endogenous 6-phosphofructokinase enzyme.

[1715] 117. The recombinant microorganism of any one of the preceding embodiments, wherein the one or more biochemical pathway comprises at least one enzyme having pentose phosphatase activity.

[1716] 118. The recombinant microorganism of any one of the preceding embodiments, wherein the at least one enzyme having pentose phosphatase activity is selected from one or more of an enzyme having D-pentose-5-phosphatase activity, an enzyme having D-xylulose-5-phosphatase activity, an enzyme having D-ribose-5-phosphatase activity, and an enzyme having D-ribulose-5-phosphatase activity.

[1717] 119. The recombinant microorganism of any one of the preceding embodiments, wherein the one or more biochemical pathway comprises at least one enzyme having arabitol phosphate dehydrogenase activity.

[1718] 120. The recombinant microorganism of any one of the preceding embodiments, wherein the at least one enzyme having arabitol phosphate dehydrogenase activity is selected from one or more of an enzyme having D-arabitol 1-phosphate 4-dehydrogenase activity, an enzyme having D-arabitol 5-phosphate 2-dehydrogenase activity, an enzyme having D-arabitol 1-phosphate 2-dehydrogenase activity and an enzyme having D-arabitol 5-phosphate 4-dehydrogenase activity.

[1719] 121. The recombinant microorganism of any one of the preceding embodiments, wherein the one or more biochemical pathway comprises at least one enzyme having phosphopentomutase activity.

[1720] 122. The recombinant microorganism of any one of the preceding embodiments, wherein the recombinant microorganism further comprises a deleted or diminished activity in one or more endogenous enzymes selected from glucose 6-phosphate-1-dehydrogenase, 6-phosphogluconolactonase and 6-phosphogluconate dehydrogenase.

[1721] 123. The recombinant microorganism of any one of the preceding embodiments, wherein the one or more co-product is selected from acetone, isopropanol, propene, isobutene and one or more serine pathway compounds.

[1722] 124. The recombinant microorganism of any one of the preceding embodiments, wherein the one or more serine pathway compounds is selected from serine, glycine, monoethanolamine (MEA) and ethylenediamine (EDA).

[1723] 125. The recombinant microorganism of any one of the preceding embodiments, wherein the one or more hexose feedstock is selected from glucose or oligomers of glucose thereof.

[1724] 126. The recombinant microorganism of any one of the preceding embodiments, wherein the oligomers of glucose are selected from fructose, sucrose, starch, cellobiose, maltose, lactose and cellulose.

[1725] 127. The recombinant microorganism of any one of the preceding embodiments, wherein the expression of an enzyme having transketolase activity or an enzyme having fructose-6-phosphate phosphoketolase activity enables a lossless conversion of one or more hexose feedstock to the one or more pentose-5-phosphate intermediate.

[1726] 128. The recombinant microorganism of any one of the preceding embodiments, wherein MEG or GA is produced through the conversion of glycolaldehyde in a C2 pathway and through the conversion of dihydroxyacetone phosphate (DHAP) or pyruvate in a C3 pathway.

[1727] 129. The recombinant microorganism of any one of the preceding embodiments, wherein GA is produced by the oxidation of glycolaldehyde by a glycolaldehyde dehydrogenase.

[1728] 130. The recombinant microorganism of any one of the preceding embodiments, wherein one or more enzyme for the production of MEG or GA through the conversion of DHAP or pyruvate in a C3 pathway are selected from one or more enzyme having an activity selected from a 3-phosphoglycerate dehydrogenase activity, a phosphoserine aminotransferase activity, a 3-phosphohydroxypyruvate phosphatase activity, a phosphoserine phosphatase activity, a serine transaminase activity, a hydroxypyruvate decarboxylase activity, a 3-phosphohydroxypyruvate reductase activity, a glycolaldehyde reductase activity, a glycolaldehyde dehydrogenase activity, a serine oxidoreductase (deaminating) or serine-pyruvate aminotransferase activity, a serine decarboxylase activity, an ethanolamine aminotransferase or ethanolamine oxidoreductase (deaminating) activity, a glycerate decarboxylase activity, a hydroxypyruvate reductase activity, a 3-phosphoglycerate phosphatase activity, a 2-phosphoglycerate phosphatase activity, a glycerate 3-kinase activity, and a glycerate 2-kinase activity.

[1729] 131. The recombinant microorganism of any one of the preceding embodiments, wherein MEG or GA is produced through the conversion of glycolaldehyde in a C2 pathway and one or more co-product is produced through the conversion of dihydroxyacetone phosphate (DHAP) or pyruvate in a C3 pathway.

[1730] 132. The recombinant microorganism of any one of the preceding embodiments, wherein one or more enzyme for the production of one or more co-product through the conversion of DHAP or pyruvate in a C3 pathway are selected from one or more enzyme having an activity selected from a thiolase or acetyl coenzyme A acetyltransferase activity, an acetyl-CoA:acetoacetate transferase or acetate:acetoacetyl-CoA hydrolase activity, and an acetoacetate decarboxylase activity, and wherein the one or more co-product comprises acetone.

[1731] 133. The recombinant microorganism of any one of the preceding embodiments, wherein one or more enzyme for the production of one or more co-product through the conversion of DHAP or pyruvate in a C3 pathway are selected from one or more enzyme having an activity selected from a thiolase or acetyl coenzyme A acetyltransferase activity, an acetyl-CoA:acetoacetate transferase or acetate:acetoacetyl-CoA hydrolase activity, an acetoacetate decarboxylase activity, and a secondary alcohol dehydrogenase activity, and wherein the one or more co-product comprises isopropanol.

[1732] 134. The recombinant microorganism of any one of the preceding embodiments, wherein one or more enzyme for the production of one or more co-product through the conversion of DHAP or pyruvate in a C3 pathway are selected from one or more enzyme having an activity selected from a thiolase or acetyl coenzyme A acetyltransferase activity, an acetyl-CoA:acetoacetate transferase or acetate:acetoacetyl-CoA hydrolase activity, an acetoacetate decarboxylase activity, a secondary alcohol dehydrogenase activity, and a dehydratase-isomerase activity, and wherein the one or more co-product comprises propene.

[1733] 135. The method of any one of the preceding embodiments, wherein one or more enzyme for the production of one or more co-product through the conversion of DHAP or pyruvate in a C3 pathway are selected from one or more enzyme having an activity selected from a thiolase or acetyl coenzyme A acetyltransferase activity, an acetyl-CoA:acetoacetate transferase or acetate:acetoacetyl-CoA hydrolase activity, an acetoacetate decarboxylase activity, a 3-hydroxyisovalerate (3HIV) synthase activity, a hydroxymethylglutaryl-CoA synthase activity, a methylglutaconyl-CoA hydratase activity, a methylcrotonyl-CoA carboxylase activity, a methylcrotonyl-CoA hydratase activity, a 3-hydroxyisovaleryl-CoA thioesterase activity, a 3HIV kinase activity, a 3HIV-3-phosphate decarboxylase activity, and a 3HIV decarboxylase activity, and wherein the one or more co-product comprises isobutene.

[1734] 136. The method of any one of the preceding embodiments, wherein one or more enzyme for the production of one or more co-product through the conversion of DHAP or pyruvate in a C3 pathway are selected from one or more enzyme having an activity selected from a 3-phosphoglycerate dehydrogenase activity, a phosphoserine aminotransferase activity, a 3-phosphohydroxypyruvate phosphatase activity, a phosphoserine phosphatase activity, a serine oxidoreductase (deaminating) or serine-pyruvate aminotransferase activity, a hydroxypyruvate reductase activity, a 3-phosphoglycerate phosphatase activity, a 2-phosphoglycerate phosphatase activity, a glycerate 3-kinase activity, and a glycerate 2-kinase activity, and wherein the one or more co-product comprises L-serine.

[1735] 137. The method of any one of the preceding embodiments, wherein one or more enzyme for the production of one or more co-product through the conversion of DHAP or pyruvate in a C3 pathway are selected from one or more enzyme having an activity selected from a serine hydroxymethyltransferase activity, a transferase activity, a formaldehyde dehydrogenase activity, a formate dehydrogenase activity, an activity associated with glycine cleavage system, a 3-phosphoglycerate dehydrogenase activity, a phosphoserine aminotransferase activity, a 3-phosphohydroxypyruvate phosphatase activity, a phosphoserine phosphatase activity, a serine transaminase activity, a hydroxypyruvate decarboxylase activity, a serine oxidoreductase (deaminating) activity, a serine decarboxylase activity, an ethanolamine aminotransferase or ethanolamine oxidoreductase (deaminating) activity, a hydroxypyruvate reductase activity, a 3-phosphoglycerate phosphatase activity, a 2-phosphoglycerate phosphatase activity, a glycerate 3-kinase activity, a glycerate 2-kinase activity, a glycolaldehyde dehydrogenase activity, a glycolate dehydrogenase activity, an alanine-glyoxylate aminotransferase activity, an alanine transaminase activity, an NAD(P)H dependent glutamate dehydrogenase activity, and wherein the one or more co-product comprises glycine.

[1736] 138. The method of any one of the preceding embodiments, wherein the activity associated with glycine cleavage system comprise an enzyme or protein selected from a glycine decarboxylase (P protein), an aminomethyltransferase (T protein), a dihydrolipoamide dehydrogenase (L protein), and an H protein.

[1737] 139. The method of any one of the preceding embodiments, wherein one or more enzyme for the production of one or more co-product through the conversion of DHAP or pyruvate in a C3 pathway are selected from one or more enzyme having an activity selected from a 3-phosphoglycerate dehydrogenase activity, a phosphoserine aminotransferase activity, a 3-phosphohydroxypyruvate phosphatase activity, a phosphoserine phosphatase activity, a transaminase activity, a hydroxypyruvate decarboxylase activity, a serine oxidoreductase (deaminating) or serine-pyruvate aminotransferase activity, a serine decarboxylase activity, a hydroxypyruvate reductase activity, a 3-phosphoglycerate phosphatase activity, a 2-phosphoglycerate phosphatase activity, a glycerate 3-kinase activity, a glycerate 2-kinase activity, an acetaldehyde dehydrogenase activity, and an ethanolamine ammonia lyase activity, and wherein the one or more co-product comprises monoethanolamine (MEA).

[1738] 140. The method of any one of the preceding embodiments, wherein one or more enzyme for the production of one or more co-product through the conversion of DHAP or pyruvate in a C3 pathway are selected from one or more enzyme having an activity selected from a serine dehydrogenase activity, a 2-aminomalonate semialdehyde decarboxylase activity, an aminoacetaldehyde transaminase activity, a 2-aminomalonate semialdehyde transaminase activity, a 2,3-diaminopropanoate decarboxylase activity, a serine decarboxylase activity, an ethanolamine dehydrogenase activity, a serine hydroxymethyltransferase activity, an aldehyde oxidase activity, an N-acetyl transferase or O-acetyl transferase activity, an N-acetylserine dehydrogenase activity, a transaminase activity, a deacetylase activity, a serine aminase activity, and a 2,3-diaminopropanoate ammonia lyase activity, and wherein the one or more co-product comprises ethylenediamine (EDA).

[1739] 141. The recombinant microorganism of any one of the preceding embodiments, wherein one or more enzyme for the production of MEG or GA from glycolaldehyde in a C2 pathway are selected from one or more enzyme having an activity selected from a D-tagatose 3-epimerase activity, a D-ribulokinase activity, a D-ribulose-1-phosphate aldolase activity, a D-xylulose 1-kinase activity, a D-xylulose-1-phosphate aldolase activity, a xylose reductase or aldose reductase activity, a xylitol dehydrogenase activity, a xylose isomerase activity, a xylose dehydrogenase activity, a xylonolactonase activity, a xylonate dehydrogenase activity, a 2-keto-3-deoxy-D-pentonate aldolase activity, a glycolaldehyde reductase activity and a glycolaldehyde dehydrogenase activity.

[1740] 142. The recombinant microorganism of any one of the preceding embodiments, wherein the recombinant microorganism further comprises one or more modifications to diminish or delete activity in a glycolaldehyde dehydrogenase, a lactate dehydrogenase, a xylose isomerase, a xylulose kinase or combination thereof.

[1741] 143. The recombinant microorganism of any one of the preceding embodiments, wherein at least a portion of the excess NADH produced in the C3 pathway is used as a source of reducing equivalents in the C2 pathway.

[1742] 144. The recombinant microorganism of any one of the preceding embodiments, wherein at least a portion of the excess NADH produced in the C3 pathway is used to produce ATP.

[1743] 145. The recombinant microorganism of any one of the preceding embodiments, wherein excess biomass formation is minimized and production of MEG (or GA) or MEG (or GA) and one or more co-product is maximized.

[1744] 146. A method of producing MEG or glycolic acid (GA) using a recombinant microorganism of any of the preceding Embodiments, wherein the method comprises cultivating the recombinant microorganism in a culture medium containing one or more hexose feedstock providing a carbon source until the MEG or GA is produced.

[1745] 147. The method of any one of the preceding embodiments, wherein one or more co-product is co-produced with MEG or GA.

[1746] 148. The method of any one of the preceding embodiments, wherein the one or more co-product is selected from acetone, isopropanol, propene, isobutene and one or more serine pathway compound.

[1747] 149. The method of any one of the preceding embodiments, wherein the one or more serine pathway compound is selected from serine, glycine, monoethanolamine (MEA) and ethylenediamine (EDA).

[1748] 150. A method of producing a recombinant microorganism that produces or accumulates MEG or glycolic acid (GA) from one or more exogenous hexose feedstock via one or more pentose-5-phosphate intermediate, comprising:
[1749] introducing into or expressing in the recombinant microorganism one or more enzyme for the conversion of the one or more hexose feedstock to the one or more pentose-5-phosphate intermediate;
[1750] introducing into or expressing in the recombinant microorganism one or more enzyme for the conversion of the one or more pentose-5-phosphate intermediate to one or more pentose or pentose-1-phosphate intermediate;
[1751] introducing into or expressing in the recombinant microorganism a C2 pathway comprising one or more enzyme for the production of MEG or GA from glycolaldehyde; and
[1752] introducing into or expressing in the recombinant microorganism a C3 pathway comprising one or more enzyme for the production of MEG or GA derived from DHAP or pyruvate; and
[1753] culturing the recombinant microorganism in a culture medium containing the one or more hexose feedstock to produce or accumulate MEG or GA,
[1754] wherein glycolaldehyde and DHAP (or pyruvate) are intermediates produced in the C2 pathway, and wherein MEG or GA are produced in both the C2 and C3 pathways.

[1755] 151. A method of producing a recombinant microorganism that produces or accumulates MEG or glycolic acid (GA) and one or more co-product from one or more exogenous hexose feedstock via one or more pentose-5-phosphate intermediate, comprising:
[1756] introducing into or expressing in the recombinant microorganism one or more enzyme for the conversion of the one or more hexose feedstock to the one or more pentose-5-phosphate intermediate;
[1757] introducing into or expressing in the recombinant microorganism one or more enzyme for the conversion of the one or more pentose-5-phosphate intermediate to one or more pentose or pentose-1-phosphate intermediate;
[1758] introducing into or expressing in the recombinant microorganism a C2 pathway comprising one or more enzyme for the production of MEG or GA from glycolaldehyde; and
[1759] introducing into or expressing in the recombinant microorganism a C3 pathway comprising one or more enzyme for the production of one or more co-product derived from DHAP or pyruvate; and culturing the recombinant microorganism in a culture medium containing the one or more hexose feedstock to produce or accumulate MEG or GA and one or more co-product, wherein glycolaldehyde and DHAP (or pyruvate) are intermediates produced in the C2 pathway, and wherein MEG or GA is produced in the C2 pathway and the one or more co-product is produced in the C3 pathway.

[1760] 152. The method of any one of the preceding embodiments, wherein the glycolaldehyde is oxidized to glycolic acid by a glycoladehyde dehydrogenase.

[1761] 153. The method of any one of the preceding embodiments, wherein the one or more enzyme for the conversion of the one or more hexose feedstock to the one or more pentose-5-phosphate intermediate are selected from one or more enzyme having a transketolase activity, a transaldolase activity, a ribulose-5-phosphate 3-epimerase activity, and a ribose-5-phosphate isomerase activity.

[1762] 154. The method of any one of the preceding embodiments, wherein the method further comprises introducing into the recombinant microorganism one or more modifications to diminish or delete activity in one or more endogenous enzymes selected from glyceraldehyde 3-phosphate dehydrogenase (gapA), phosphoglycerate kinase (pgk) and phosphoglycerate mutase (gpmA and/or gpmM).

[1763] 155. The method of any one of the preceding embodiments, wherein the one or more enzyme for the conversion of the one or more hexose feedstock to the one or more pentose-5-phosphate intermediate are selected from one or more enzyme having a fructose-6-phosphate phosphoketolase activity, a phosphate acetyltransferase activity, a transketolase activity, a transaldolase activity, a ribulose-5-phosphate 3-epimerase activity, and a ribose-5-phosphate isomerase activity.

[1764] 156. The method of any one of the preceding embodiments, wherein the method further comprises introducing into the recombinant microorganism one or more modifications to diminish or delete activity in an endogenous 6-phosphofructokinase (pfkA and/or pfkB) enzyme.

[1765] 157. The method of any one of the preceding embodiments, wherein the method further comprises: introducing into the recombinant microorganism one or more modifications to diminish or delete activity in one or more endogenous enzymes selected from glucose 6-phosphate-1-dehydrogenase, 6-phosphogluconolactonase, and 6-phosphogluconate dehydrogenase.

[1766] 158. The method of any one of the preceding embodiments, wherein the one or more enzyme for the conversion of the one or more pentose-5-phosphate intermediate to one or more pentose or pentose-1-phosphate intermediate are selected from one or more enzyme having a pentose phosphatase activity, a D-ribulose-5-phosphatase activity, a D-ribose-5-phosphatase activity, a D-ribose isomerase activity, an arabitol phosphate dehydrogenase activity, and a phosphopentomutase activity.

[1767] 159. The method of any one of the preceding embodiments, wherein one or more enzyme for the production of MEG or GA derived from DHAP or pyruvate in the C3 pathway are selected from one or more enzyme having an activity selected from a 3-phosphoglycerate dehydrogenase activity, a phosphoserine aminotransferase activity, a 3-phosphohydroxypyruvate phosphatase activity, a phosphoserine phosphatase activity, a serine transaminase activity, a hydroxypyruvate decarboxylase activity, a 3-phosphohydroxypyruvate reductase activity, a glycolaldehyde reductase activity, a glycolaldehyde dehydrogenase activity, a serine oxidoreductase (deaminating) or serine-pyruvate aminotransferase activity, a serine decarboxylase activity, an ethanolamine aminotransferase or ethanolamine oxidoreductase (deaminating) activity, a glycerate decarboxylase activity, a hydroxypyruvate reductase activity, a 3-phosphoglycerate phosphatase activity, a 2-phosphoglycerate phosphatase activity, a glycerate 3-kinase activity, and a glycerate 2-kinase activity.

[1768] 160. The method of any one of the preceding embodiments, wherein one or more enzyme for the production of one or more co-product derived from DHAP or pyruvate in the C3 pathway are selected from one or more enzyme having an activity selected from a thiolase or acetyl coenzyme A acetyltransferase activity, an acetyl-CoA:acetoacetate transferase or acetate:acetoacetyl-CoA hydrolase activity, and an acetoacetate decarboxylase activity, and wherein the one or more co-product comprises acetone.

[1769] 161. The method of any one of the preceding embodiments, wherein one or more enzyme for the production of one or more co-product derived from DHAP or pyruvate in the C3 pathway are selected from one or more enzyme having an activity selected from a thiolase or acetyl coenzyme A acetyltransferase activity, an acetyl-CoA:acetoacetate transferase or acetate:acetoacetyl-CoA hydrolase activity, an acetoacetate decarboxylase activity, and a secondary alcohol dehydrogenase activity, and wherein the one or more co-product comprises isopropanol.

[1770] 162. The method of any one of the preceding embodiments, wherein one or more enzyme for the production of one or more co-product derived from DHAP or pyruvate in the C3 pathway are selected from one or more enzyme having an activity selected from a thiolase or acetyl coenzyme A acetyltransferase activity, an acetyl-CoA:acetoacetate transferase or acetate:acetoacetyl-CoA hydrolase activity, an acetoacetate decarboxylase activity, a secondary alcohol dehydrogenase activity, and a dehydratase activity, and wherein the one or more co-product comprises propene.

[1771] 163. The method of any one of the preceding embodiments, wherein one or more enzyme for the production of one or more co-product derived from DHAP or pyruvate in the C3 pathway are selected from one or more enzyme having an activity selected from a thiolase or acetyl coenzyme A acetyltransferase activity, an acetyl-CoA:acetoacetate transferase or acetate:acetoacetyl-CoA hydrolase activity, an acetoacetate decarboxylase activity, a 3-hydroxyisovalerate (3HIV) synthase activity, a hydroxymethylglutaryl-CoA synthase activity, a methylglutaconyl-CoA hydratase activity, a methylcrotonyl-CoA carboxylase activity, a methylcrotonyl-CoA hydratase activity, a 3-hydroxyisovaleryl-CoA thioesterase activity, a 3HIV kinase activity, a 3HIV-3-phosphate decarboxylase activity, and a 3HIV decarboxylase activity, and wherein the one or more co-product comprises isobutene.

[1772] 164. The method of any one of the preceding embodiments, wherein one or more enzyme for the production of one or more co-product derived from DHAP or pyruvate in the C3 pathway are selected from one or more enzyme having an activity selected from a 3-phosphoglycerate dehydrogenase activity, a phosphoserine aminotransferase activity, a 3-phosphohydroxypyruvate phosphatase activity, a phosphoserine phosphatase activity, a serine oxidoreductase (deaminating) or serine-pyruvate aminotransferase activity, a hydroxypyruvate reductase activity, a 3-phosphoglycerate phosphatase activity, a 2-phosphoglycerate phosphatase activity, a glycerate 3-kinase activity, and a glycerate 2-kinase activity, and wherein the one or more co-product comprises L-serine.

[1773] 165. The method of any one of the preceding embodiments, wherein one or more enzyme for the production of one or more co-product derived from DHAP or pyruvate in the C3 pathway are selected from one or more enzyme having an activity selected from a serine hydroxymethyltransferase activity, a transferase activity, a formaldehyde dehydrogenase activity, a formate dehydrogenase activity, an activity associated with glycine cleavage system, a 3-phosphoglycerate dehydrogenase activity, a phosphoserine aminotransferase activity, a 3-phosphohydroxypyruvate phosphatase activity, a phosphoserine phosphatase activity, a serine transaminase activity, a hydroxypyruvate decarboxylase activity, a serine oxidoreductase (deaminating) activity, a serine decarboxylase activity, an ethanolamine aminotransferase or ethanolamine oxidoreductase (deaminating) activity, a hydroxypyruvate reductase activity, a 3-phosphoglycerate phosphatase activity, a 2-phosphoglycerate phosphatase activity, a glycerate 3-kinase activity, a glycerate 2-kinase activity, a glycolaldehyde dehydrogenase activity, a glycolate dehydrogenase activity, an alanine-glyoxylate aminotransferase activity, an alanine transaminase activity, and an NAD(P)H dependent glutamate dehydrogenase activity, and wherein the one or more co-product comprises glycine.

[1774] 166. The method of any one of the preceding embodiments, wherein the activity associated with glycine cleavage system comprise an enzyme or protein selected from a glycine decarboxylase (P protein), an aminomethyltransferase (T protein), a dihydrolipoamide dehydrogenase (L protein), and an H protein.

[1775] 167. The method of any one of the preceding embodiments, wherein one or more enzyme for the production of one or more co-product derived from DHAP or pyruvate in the C3 pathway are selected from one or more enzyme having an activity selected from 3-phosphoglycerate dehydrogenase activity, a phosphoserine aminotransferase activity, a 3-phosphohydroxypyruvate phosphatase activity, a phosphoserine phosphatase activity, a transaminase activity, a hydroxypyruvate decarboxylase activity, a serine oxidoreductase (deaminating) or serine-pyruvate aminotransferase activity, a serine decarboxylase activity, a hydroxypyruvate reductase activity, a 3-phosphoglycerate phosphatase activity, a 2-phosphoglycerate phosphatase activity, a glycerate 3-kinase activity, a glycerate 2-kinase activity, an acetaldehyde dehydrogenase activity, and an ethanolamine ammonia lyase activity, and wherein the one or more co-product comprises monoethanolamine (MEA).

[1776] 168. The method of any one of the preceding embodiments, wherein one or more enzyme for the production of one or more co-product derived from DHAP or pyruvate in the C3 pathway are selected from one or more enzyme having an activity selected from a serine dehydrogenase activity, a 2-aminomalonate semialdehyde decarboxylase activity, an aminoacetaldehyde transaminase activity, a 2-aminomalonate semialdehyde transaminase activity, a 2,3-diaminopropanoate decarboxylase activity, a serine decarboxylase activity, an ethanolamine dehydrogenase activity, a serine hydroxymethyltransferase activity, an aldehyde oxidase activity, an N-acetyl transferase or O-acetyl transferase activity, an N-acetylserine dehydrogenase activity, a transaminase activity, a deacetylase activity, a serine aminase activity, and a 2,3-diaminopropanoate ammonia lyase activity, and wherein the one or more co-product comprises ethylenediamine (EDA).

[1777] 169. The method of any one of the preceding embodiments, wherein one or more enzyme for the production of MEG or GA in the C2 pathway are selected from one or more enzyme having an activity selected from a D-tagatose 3-epimerase activity, a D-ribulokinase activity, a D-ribulose-1-phosphate aldolase activity, a D-xylulose 1-kinase activity, a D-xylulose-1-phosphate aldolase activity, a xylose reductase or aldose reductase activity, a xylitol dehydrogenase activity, a xylose isomerase activity, a xylose dehydrogenase activity, a xylonolactonase activity, a xylonate dehydrogenase activity, a 2-keto-3-deoxy-D-pentonate aldolase activity, a glycolaldehyde reductase activity and a glycolaldehyde dehydrogenase activity.

[1778] 170. The method of any one of the preceding embodiments, wherein the method further comprises: introducing into the recombinant microorganism one or more modifications to diminish or delete activity in a glycolaldehyde dehydrogenase, a lactate dehydrogenase, a xylose isomerase, a xylulose kinase or combination thereof.

[1779] The foregoing detailed description has been given for clearness of understanding only and no unnecessary limitations should be understood there from as modifications will be obvious to those skilled in the art.

[1780] While the disclosure has been described in connection with specific embodiments thereof, it will be understood that it is capable of further modifications and this application is intended to cover any variations, uses, or adaptations of the disclosure following, in general, the principles of the disclosure and including such departures from the present disclosure as come within known or customary practice within the art to which the disclosure pertains and as may be applied to the essential features hereinbefore set forth and as follows in the scope of the appended claims.

[1781] The disclosures, including the claims, figures and/or drawings, of each and every patent, patent application, and publication cited herein are hereby incorporated herein by reference in their entireties

### INCORPORATION BY REFERENCE

[1782] All references, articles, publications, patents, patent publications, and patent applications cited herein are incorporated by reference in their entireties for all purposes. However, mention of any reference, article, publication, patent, patent publication, and patent application cited herein is not, and should not be taken as, an acknowledgment or any form of suggestion that they constitute valid prior art or form part of the common general knowledge in any country in the world. Further, the following references are hereby incorporated by reference. See PCT publication WO2001053306; U.S. Pat. No. 7,226,761B2; and EPO Publication No. EP2957640.

1. A recombinant microorganism comprising one or more biochemical pathway that produces monoethylene glycol (MEG) or glycolic acid (GA) from one or more hexose feedstock via one or more pentose-5-phosphate intermediates, wherein the one or more pentose-5-phosphate intermediates is one or more of D-ribose-5-phosphate, D-xylulose-5-phosphate or D-ribulose-5-phosphate.

2. The recombinant microorganism of claim 1, wherein one or more co-product is co-produced with MEG or GA.

3. (canceled)

4. The recombinant microorganism of claim 1,
wherein the one or more biochemical pathway comprises expression of at least one enzyme having transketolase activity, wherein the at least one enzyme having transketolase activity is encoded by an amino acid sequence having at least 70% sequence identity, at least 80% sequence identity, or at least 90% sequence identity to tktA tktB from E. coli.

5. (canceled)

6. The recombinant microorganism of claim 1, wherein the one or more biochemical pathway comprises expression of at least one enzyme having transaldolase activity, wherein the at least one enzyme having transaldolase activity is encoded by an amino acid sequence having at least 70% sequence identity, at least 80% sequence identity, or at least 90% sequence identity to talB or talB from E. coli.

7. (canceled)

8. The recombinant microorganism of claim 1, wherein the one or more biochemical pathway comprises expression of at least one enzyme having ribulose-5-phosphate 3-epimerase activity, wherein the at least one enzyme having ribulose-5-phosphate 3-epimerase activity is encoded by an amino acid sequence having at least 70% sequence identity, at least 80% sequence identity, or at least 90% sequence identity to rpe from E. coli.

9. (canceled)

10. The recombinant microorganism of claim 1, wherein the one or more biochemical pathway comprises expression of at least one enzyme having ribose-5-phosphate isomerase activity, wherein the at least one enzyme having ribose-5-phosphate isomerase activity is encoded by an amino acid sequence having at least 70% sequence identity, at least 80% sequence identity, or at least 90% sequence identity to rpiA or rpiB from E. coli.

11. (canceled)

12. The recombinant microorganism of claim 1, wherein the recombinant microorganism further comprises a deleted or diminished activity in at least one endogenous enzyme selected from glyceraldehyde 3-phosphate dehydrogenase, phosphoglycerate kinase and/or phosphoglycerate mutase.

13. The recombinant microorganism of claim 1, wherein the one or more biochemical pathway comprises expression of at least one enzyme having fructose-6-phosphate phosphoketolase activity, wherein the at least one enzyme having fructose-6-phosphate phosphoketolase activity is encoded by an amino acid sequence having at least 70% sequence identity, at least 80% sequence identity, or at least 90% sequence identity to an enzyme having fructose-6-phosphate phosphoketolase activity selected from the group consisting of Bifidobacterium dentium BDP_1006, Bifidobacterium lactis xfp, Lactobacillus paraplantarum xpkA and Bifidobacterium breve xfp.

14. (canceled)

15. The recombinant microorganism of claim 13, wherein the one or more biochemical pathway comprises expression of at least one enzyme having phosphate acetyltransferase activity, wherein the at least one enzyme having phosphate acetyltransferase activity is encoded by an amino acid sequence having at least 70% sequence identity, at least 80% sequence identity, or at least 90% sequence identity to an enzyme having phosphate acetyltransferase activity selected from E. coli pta and Clostridium acetobutylicum pta.

16. (canceled)

17. The recombinant microorganism of claim 1, wherein the recombinant microorganism further comprises a deleted or diminished activity in an endogenous 6-phosphofructokinase enzyme.

18. The recombinant microorganism of claim 1, wherein the one or more biochemical pathway comprises at least one enzyme having pentose phosphatase activity, wherein the at least one enzyme having pentose phosphatase activity is selected from one or more of an enzyme having D-pentose-5-phosphatase activity, an enzyme having D-xylulose-5-phosphatase activity, an enzyme having D-ribose-5-phosphatase activity, and an enzyme having D-ribulose-5-phosphatase activity.

19. (canceled)

20. The recombinant microorganism of claim 1, wherein the one or more biochemical pathway comprises at least one enzyme having arabitol phosphate dehydrogenase activity, wherein the at least one enzyme having arabitol phosphate dehydrogenase activity is selected from one or more of an enzyme having D-arabitol 1-phosphate 4-dehydrogenase activity, an enzyme having D-arabitol 5-phosphate 2-dehydrogenase activity, an enzyme having D-arabitol 1-phosphate 2-dehydrogenase activity and an enzyme having D-arabitol 5-phosphate 4-dehydrogenase activity.

21. (canceled)

22. The recombinant microorganism of claim 1, wherein the one or more biochemical pathway comprises at least one enzyme having phosphopentomutase activity.

23. The recombinant microorganism of claim 1, wherein the recombinant microorganism further comprises a deleted or diminished activity in one or more endogenous enzymes selected from glucose 6-phosphate-1-dehydrogenase, 6-phosphogluconolactonase and 6-phosphogluconate dehydrogenase.

24-27. (canceled)

28. The recombinant microorganism of claim 1, wherein the expression of an enzyme having transketolase activity or an enzyme having fructose-6-phosphate phosphoketolase activity enables a lossless conversion of one or more hexose feedstock to the one or more pentose-5-phosphate intermediate.

29. The recombinant microorganism of claim 1, wherein MEG or GA is produced through the conversion of glycolaldehyde in a C2 pathway and through the conversion of dihydroxyacetone phosphate (DHAP) or pyruvate in a C3 pathway.

30.-31. (canceled)

32. The recombinant microorganism of claim 1, wherein MEG or GA is produced through the conversion of glycolaldehyde in a C2 pathway and one or more co-product is produced through the conversion of dihydroxyacetone phosphate (DHAP) or pyruvate in a C3 pathway.

33-46. (canceled)

47. A method of producing MEG or glycolic acid (GA) using a recombinant microorganism of claim 1, wherein the method comprises cultivating the recombinant microorganism in a culture medium containing one or more hexose feedstock providing a carbon source until the MEG or GA is produced.

48-50. (canceled)

51. A method of producing a recombinant microorganism that produces or accumulates MEG or glycolic acid (GA) from one or more exogenous hexose feedstock via one or more pentose-5-phosphate intermediate, comprising:
introducing into or expressing in the recombinant microorganism one or more enzyme for the conversion of the one or more hexose feedstock to the one or more pentose-5-phosphate intermediate;
introducing into or expressing in the recombinant microorganism one or more enzyme for the conversion of the one or more pentose-5-phosphate intermediate to one or more pentose or pentose-1-phosphate intermediate;
introducing into or expressing in the recombinant microorganism a C2 pathway comprising one or more enzyme for the production of MEG or GA from glycolaldehyde; and
introducing into or expressing in the recombinant microorganism a C3 pathway comprising one or more enzyme for the production of MEG or GA derived from DHAP or pyruvate; and
culturing the recombinant microorganism in a culture medium containing the one or more hexose feedstock to produce or accumulate MEG or GA,
wherein glycolaldehyde and DHAP (or pyruvate) are intermediates produced in the C2 pathway, and wherein MEG or GA are produced in both the C2 and C3 pathways.

52. A method of producing a recombinant microorganism that produces or accumulates MEG or glycolic acid (GA) and one or more co-product from one or more exogenous hexose feedstock via one or more pentose-5-phosphate intermediate, comprising:
introducing into or expressing in the recombinant microorganism one or more enzyme for the conversion of the one or more hexose feedstock to the one or more pentose-5-phosphate intermediate;
introducing into or expressing in the recombinant microorganism one or more enzyme for the conversion of the one or more pentose-5-phosphate intermediate to one or more pentose or pentose-1-phosphate intermediate;
introducing into or expressing in the recombinant microorganism a C2 pathway comprising one or more enzyme for the production of MEG or GA from glycolaldehyde; and
introducing into or expressing in the recombinant microorganism a C3 pathway comprising one or more enzyme for the production of one or more co-product derived from DHAP or pyruvate; and
culturing the recombinant microorganism in a culture medium containing the one or more hexose feedstock to produce or accumulate MEG or GA and one or more co-product, wherein glycolaldehyde and DHAP (or pyruvate) are intermediates produced in the C2 pathway, and wherein MEG or GA is produced in the C2 pathway and the one or more co-product is produced in the C3 pathway.

53.-71. (canceled)

The application's sequence listing, which the Patent Office published only in electronic form, follows.

SEQUENCE LISTING (258 sequences)

SEQ ID NO: 1 - DNA, 873 bp, Pseudomonas cichorii
gtgaacaaagttggcatgttctacacctactggtcgactgagtggatggtcgactttccggcgactgcgaagcgcattgccgggctcggcttcgacttaatggaaatctcgctcggcgagtttcacaatctttccgacgcgaagaagcgtgagctaaaagccgtggctgatgatctggggctcacggtgatgtgctgtatcggactgaagtctgagtacgactttgcctcgccggacaagagcgttcgtgatgccggcacggaatatgtgaagcgcttgctcgacgactgtcacctcctcggcgcgccggtctttgctggccttacgttctgcgcgtggccccaatctccgccgctggacatgaaggataagcgcccttacgtcgaccgtgcaatcgaaagcgttcgtcgtgttatcaaggtagctgaagactacggcattatttatgcactggaagtggtgaaccgattcgagcagtggctttgcaatgacgccaaggaagcaattgcgtttgccgacgcggttgacagtccggcgtgcaaggtccagctcgacacattccacatgaatatcgaagagacttccttccgcgatgcaatccttgcctgcaagggcaagatgggccatttccatttgggcgaagcgaaccgtctgccgccgggcgagggtcgcctgccgtgggatgaaatattcggggcgctgaaggaaatcggatatgacggcaccatcgttatggaaccgttcatgcgcaagggcggctcggtcagccgcgcggtgggcgtatggcgggatatgtcgaacggtgcgacggacgaagagatggacgagcgcgctcgccgctcgttgcagtttgttcgtgacaagctggcctga

SEQ ID NO: 2 - DNA, 873 bp, Artificial Sequence
  Codon Optimized Pseudomonas cichorii Sequence
atgaacaaagtgggtatgttctatacgtactggtccacggaatggatggttgactttccggcaaccgcgaaacgtattgcgggcctgggcttcgacctgatggaaatttctctgggcgaatttcacaacctgtccgatgcgaaaaagcgtgaactgaaagccgttgccgacgatctgggtctgactgtgatgtgctgtatcggcctgaaatctgaatacgatttcgcgagcccggataaaagcgttcgcgacgccggtactgaatatgtcaaacgtctgctggatgactgtcacctgctgggcgcaccagtgttcgcgggtctgaccttctgtgcgtggccgcagtccccaccgctggacatgaaggataaacgtccgtacgtggaccgtgccatcgaaagcgtgcgccgcgtaatcaaagtcgctgaagattatggcattatttacgctctggaagttgttaaccgtttcgaacagtggctgtgcaacgacgcgaaagaggccattgccttcgctgacgcggtggattctccggcttgcaaagttcagctggacactttccatatgaacatcgaggaaacctccttccgtgacgcgatcctggcttgcaagggtaaaatgggccatttccatctgggcgaagcaaaccgcctgccgccgggcgaaggtcgtctgccgtgggacgaaatttttggcgctctgaaggaaatcggctacgatggcacgattgttatggagccgttcatgcgcaaaggtggctccgtttcccgtgcagttggtgtttggcgtgatatgtctaacggtgccaccgatgaagaaatggacgaacgtgcacgtcgctccctgcaattcgttcgcgataaactggcgtaa

SEQ ID NO: 3 - protein, 290 aa, Pseudomonas cichorii
MNKVGMFYTYWSTEWMVDFPATAKRIAGLGFDLMEISLGEFHNLSDAKKRELKAVADDLGLTVMCCIGLKSEYDFASPDKSVRDAGTEYVKRLLDDCHLLGAPVFAGLTFCAWPQSPPLDMKDKRPYVDRAIESVRRVIKVAEDYGIIYALEVVNRFEQWLCNDAKEAIAFADAVDSPACKVQLDTFHMNIEETSFRDAILACKGKMGHFHLGEANRLPPGEGRLPWDEIFGALKEIGYDGTIVMEPFMRKGGSVSRAVGVWRDMSNGATDEEMDERARRSLQFVRDKLA

SEQ ID NO: 4 - DNA, 888 bp, Rhodobacter sphaeroides
gtgaaaaatcctgtcggcatcatctcgatgcagttcatccggcccttcacctcggagtcgctgcatttcctgaagaagtcccgggccctgggcttcgatttcatcgagcttctcgtgcccgagcccgaagacgggctcgacgcggccgaggtgcggcgcatctgcgagggcgaggggctgggcctcgttctggccgcgcgcgtgaacctccagcgctcgatcgcgagcgaggaggccgcggcgcgggccggcgggcgcgactatctgaaatactgcatcgaggccgccgaggcgctcggcgcgaccatcgtcggcggcccgctctatggcgagccgctggtcttcgccggccgcccgcccttcccctggacggccgagcagatcgccacccgcgccgcccgcaccgtcgaggggctggccgaagtggccccgctcgccgcgagcgcgggcaaggtcttcgggctcgagccgctgaaccgcttcgagaccgacatcgtgaacacgaccgcacaggccatcgaggtggtggatgcggtgggctcgcccggtctcggcgtcatgctcgacacgttccacatgaacatggaggaacgctcgatccccgatgcgatccgcgccacaggcgcgcgcctcgtccattttcaggccaacgagaaccaccgcggcttccccggcaccggcaccatggactggacggccatcgcgcgggcgctggggcaggcgggctacgcgggtccggtctcgctcgagcctttccggcgcgacgacgagcgcgtggcgctgcccatcgcccactggcgcgccccgcacgaggacgaggacgagaagctgcgcgcggggctgggtctcatccgctccgcgatcaccctggcggaggtgacccactga

SEQ ID NO: 5 - protein, 295 aa, Rhodobacter sphaeroides
MKNPVGIISMQFIRPFTSESLHFLKKSRALGFDFIELLVPEPEDGLDAAEVRRICEGEGLGLVLAARVNLQRSIASEEAAARAGGRDYLKYCIEAAEALGATIVGGPLYGEPLVFAGRPPFPWTAEQIATRAARTVEGLAEVAPLAASAGKVFGLEPLNRFETDIVNTTAQAIEVVDAVGSPGLGVMLDTFHMNMEERSIPDAIRATGARLVHFQANENHRGFPGTGTMDWTAIARALGQAGYAGPVSLEPFRRDDERVALPIAHWRAPHEDEDEKLRAGLGLIRSAITLAEVTH

SEQ ID NO: 6 - DNA, 1422 bp, Escherichia coli
atgatgaaacaagaagttatcctggtactcgactgtggcgcgaccaatgtcagggccatcgcggttaatcggcagggcaaaattgttgcccgcgcctcaacgcctaatgccagcgatatcgcgatggaaaacaacacctggcaccagtggtctttagacgccattttgcaacgctttgctgattgctgtcggcaaatcaatagtgaactgactgaatgccacatccgcggtatcgccgtcaccacctttggtgtggatggcgctctggtagataagcaaggcaatctgctctatccgattattagctggaaatgtccgcgaacagcagcggttatggacaatattgaacggttaatctccgcacagcggttgcaggctatttctggcgtcggagcctttagtttcaatacgttatataagttggtgtggttgaaagaaaatcatccacaactgctggaacgcgcgcacgcctggctctttatttcgtcgctgattaaccaccgtttaaccggcgaattcactactgatatcacgatggccggaaccagccagatgctggatatccagcaacgcgatttcagtccgcaaattttacaagccaccggtattccacgccgactcttccctcgtctggtggaagcgggtgaacagattggtacgctacagaacagcgccgcagcaatgctcggcttacccgttggcataccggtgatttccgcaggtcacgatacccagttcgccctttttggcgctggtgctgaacaaaatgaacccgtgctctcttccggtacatgggaaattttaatggttcgcagcgcccaggttgatacttcgctgttaagtcagtacgccggttccacctgcgaactggatagccaggcagggttgtataacccaggtatgcaatggctggcatccggcgtgctggaatgggtgagaaaactgttctggacggctgaaacaccctggcaaatgttgattgaagaagctcgtctgatcgcgcctggcgcggatggcgtaaaaatgcagtgtgatttattgtcgtgtcagaacgctggctggcaaggagtgacgcttaataccacgcgggggcatttctatcgcgcggcgctggaagggttaactgcgcaattacagcgcaatctacagatgctggaaaaaatcgggcactttaaggcctctgaattattgttagtcggtggaggaagtcgcaacacattgtggaatcagattaaagccaatatgcttgatattccggtaaaagttctcgacgacgccgaaacgaccgtcgcaggagctgcgctgttcggttggtatggcgtaggggaatttaacagcccggaagaagcccgcgcacagattcattatcagtaccgttatttctacccgcaaactgaacctgaatttatagaggaagtgtga

SEQ ID NO: 7 - DNA, 1422 bp, Artificial Sequence; identical to SEQ ID NO: 6
  Codon Optimized E. coli Sequence

SEQ ID NO: 8 - protein, 473 aa, Escherichia coli
MMKQEVILVLDCGATNVRAIAVNRQGKIVARASTPNASDIAMENNTWHQWSLDAILQRFADCCRQINSELTECHIRGIAVTTFGVDGALVDKQGNLLYPIISWKCPRTAAVMDNIERLISAQRLQAISGVGAFSFNTLYKLVWLKENHPQLLERAHAWLFISSLINHRLTGEFTTDITMAGTSQMLDIQQRDFSPQILQATGIPRRLFPRLVEAGEQIGTLQNSAAAMLGLPVGIPVISAGHDTQFALFGAGAEQNEPVLSSGTWEILMVRSAQVDTSLLSQYAGSTCELDSQAGLYNPGMQWLASGVLEWVRKLFWTAETPWQMLIEEARLIAPGADGVKMQCDLLSCQNAGWQGVTLNTTRGHFYRAALEGLTAQLQRNLQMLEKIGHFKASELLLVGGGSRNTLWNQIKANMLDIPVKVLDDAETTVAGAALFGWYGVGEFNSPEEARAQIHYQYRYFYPQTEPEFIEEV

SEQ ID NO: 9 - DNA, 648 bp, Escherichia coli
atggaacgaaataaacttgctcgtcagattattgacacttgcctggaaatgacccgcctgggactgaaccaggggacagcggggaacgtcagtgtacgttatcaggatgggatgctgattacgcctacaggcattccatatgaaaaactgacggagtcgcatattgtctttattgatggcaacggtaaacatgaggaaggaaagctcccctcaagcgaatggcgtttccatatggcagcctatcaaagcagaccggatgccaacgcggttgttcacaatcatgccgttcattgcacggcagtttccattcttaaccgatcgatccccgctattcactacatgattgcggcggctggcggtaattctattccttgcgcgccttatgcgacctttggaacacgcgaactttctgaacatgttgcgctggctctcaaaaatcgtaaggcaactttgttacaacatcatgggcttatcgcttgtgaggtgaatctggaaaaagcgttatggctggcgcatgaagttgaagtgctggcgcaactttacctgacgaccctggcgattacggacccggtgccagtgctgagcgatgaagagattgccgtagtgctggagaaattcaaaacctatgggttacgaattgaagagtaa

SEQ ID NO: 10 - DNA, 648 bp, Escherichia coli; identical to SEQ ID NO: 9

SEQ ID NO: 11 - protein, 215 aa, Escherichia coli
MERNKLARQIIDTCLEMTRLGLNQGTAGNVSVRYQDGMLITPTGIPYEKLTESHIVFIDGNGKHEEGKLPSSEWRFHMAAYQSRPDANAVVHNHAVHCTAVSILNRSIPAIHYMIAAAGGNSIPCAPYATFGTRELSEHVALALKNRKATLLQHHGLIACEVNLEKALWLAHEVEVLAQLYLTTLAITDPVPVLSDEEIAVVLEKFKTYGLRIEE

SEQ ID NO: 12 - DNA, 1104 bp, Escherichia coli
atggaccgcattattcaatcaccgggtaaatacatccagggcgctgatgtgattaatcgtctgggcgaatacctgaagccgctggcagaacgctggttagtggtgggtgacaaatttgttttaggttttgctcaatccactgtcgagaaaagctttaaagatgctggactggtagtagaaattgcgccgtttggcggtgaatgttcgcaaaatgagatcgaccgtctgcgtggcatcgcggagactgcgcagtgtggcgcaattctcggtatcggtggcggaaaaaccctcgatactgccaaagcactggcacatttcatgggtgttccggtagcgatcgcaccgactatcgcctctaccgatgcaccgtgcagcgcattgtctgttatctacaccgatgagggtgagtttgaccgctatctgctgttgccaaataacccgaatatggtcattgtcgacaccaaaatcgtcgctggcgcacctgcacgtctgttagcggcgggtatcggcgatgcgctggcaacctggtttgaagcgcgtgcctgctctcgtagcggcgcgaccaccatggcgggcggcaagtgcacccaggctgcgctggcactggctgaactgtgctacaacaccctgctggaagaaggcgaaaaagcgatgcttgctgccgaacagcatgtagtgactccggcgctggagcgcgtgattgaagcgaacacctatttgagcggtgttggttttgaaagtggtggtctggctgcggcgcacgcagtgcataacggcctgaccgctatcccggacgcgcatcactattatcacggtgaaaaagtggcattcggtacgctgacgcagctggttctggaaaatgcgccggtggaggaaatcgaaaccgtagctgcccttagccatgcggtaggtttgccaataactctcgctcaactggatattaaagaagatgtcccggcgaaaatgcgaattgtggcagaagcggcatgtgcagaaggtgaaaccattcacaacatgcctggcggcgcgacgccagatcaggtttacgccgctctgctggtagccgaccagtacggtcagcgtttcctgcaagagtgggaataa

SEQ ID NO: 13 - protein, 367 aa, Escherichia coli
MDRIIQSPGKYIQGADVINRLGEYLKPLAERWLVVGDKFVLGFAQSTVEKSFKDAGLVVEIAPFGGECSQNEIDRLRGIAETAQCGAILGIGGGKTLDTAKALAHFMGVPVAIAPTIASTDAPCSALSVIYTDEGEFDRYLLLPNNPNMVIVDTKIVAGAPARLLAAGIGDALATWFEARACSRSGATTMAGGKCTQAALALAELCYNTLLEEGEKAMLAAEQHVVTPALERVIEANTYLSGVGFESGGLAAAHAVHNGLTAIPDAHHYYHGEKVAFGTLTQLVLENAPVEEIETVAALSHAVGLPITLAQLDIKEDVPAKMRIVAEAACAEGETIHNMPGGATPDQVYAALLVADQYGQRFLQEWE

SEQ ID NO: 14 - DNA, 1029 bp, Saccharomyces cerevisiae
atgtcagttttcgtttcaggtgctaacgggttcattgcccaacacattgtcgatctcctgttgaaggaagactataaggtcatcggttctgccagaagtcaagaaaaggccgagaatttaacggaggcctttggtaacaacccaaaattctccatggaagttgtcccagacatatctaagctggacgcatttgaccatgttttccaaaagcacggcaaggatatcaagatagttctacatacggcctctccattctgctttgatatcactgacagtgaacgcgatttattaattcctgctgtgaacggtgttaagggaattctccactcaattaaaaaatacgccgctgattctgtagaacgtgtagttctcacctcttcttatgcagctgtgttcgatatggcaaaagaaaacgataagtctttaacatttaacgaagaatcctggaacccagctacctgggagagttgccaaagtgacccagttaacgcctactgtggttctaagaagtttgctgaaaaagcagcttgggaatttctagaggagaatagagactctgtaaaattcgaattaactgccgttaacccagtttacgtttttggtccgcaaatgtttgacaaagatgtgaaaaaacacttgaacacatcttgcgaactcgtcaacagcttgatgcatttatcaccagaggacaagataccggaactatttggtggatacattgatgttcgtgatgttgcaaaggctcatttagttgccttccaaaagagggaaacaattggtcaaagactaatcgtatcggaggccagatttactatgcaggatgttctcgatatccttaacgaagacttccctgttctaaaaggcaatattccagtggggaaaccaggttctggtgctacccataacacccttggtgctactcttgataataaaaagagtaagaaattgttaggtttcaagttcaggaacttgaaagagaccattgacgacactgcctcccaaattttaaaatttgagggcagaatataa

SEQ ID NO: 15 - protein, 342 aa, Saccharomyces cerevisiae
MSVFVSGANGFIAQHIVDLLLKEDYKVIGSARSQEKAENLTEAFGNNPKFSMEVVPDISKLDAFDHVFQKHGKDIKIVLHTASPFCFDITDSERDLLIPAVNGVKGILHSIKKYAADSVERVVLTSSYAAVFDMAKENDKSLTFNEESWNPATWESCQSDPVNAYCGSKKFAEKAAWEFLEENRDSVKFELTAVNPVYVFGPQMFDKDVKKHLNTSCELVNSLMHLSPEDKIPELFGGYIDVRDVAKAHLVAFQKRETIGQRLIVSEARFTMQDVLDILNEDFPVLKGNIPVGKPGSGATHNTLGATLDNKKSKKLLGFKFRNLKETIDDTASQILKFEGRI

SEQ ID NO: 16 - DNA, 984 bp, Saccharomyces cerevisiae
atgtcttcactggttactcttaataacggtctgaaaatgcccctagtcggcttagggtgctggaaaattgacaaaaaagtctgtgcgaatcaaatttatgaagctatcaaattaggctaccgtttattcgatggtgcttgcgactacggcaacgaaaaggaagttggtgaaggtatcaggaaagccatctccgaaggtcttgtttctagaaaggatatatttgttgtttcaaagttatggaacaattttcaccatcctgatcatgtaaaattagctttaaagaagaccttaagcgatatgggacttgattatttagacctgtattatattcacttcccaatcgccttcaaatatgttccatttgaagagaaataccctccaggattctatacgggcgcagatgacgagaagaaaggtcacatcaccgaagcacatgtaccaatcatagatacgtaccgggctctggaagaatgtgttgatgaaggcttgattaagtctattggtgtttccaactttcagggaagcttgattcaagatttattacgtggttgtagaatcaagcccgtggctttgcaaattgaacaccatccttatttgactcaagaacacctagttgagttttgtaaattacacgatatccaagtagttgcttactcctccttcggtcctcaatcattcattgagatggacttacagttggcaaaaaccacgccaactctgttcgagaatgatgtaatcaagaaggtctcacaaaaccatccaggcagtaccacttcccaagtattgcttagatgggcaactcagagaggcattgccgtcattccaaaatcttccaagaaggaaaggttacttggcaacctagaaatcgaaaaaaagttcactttaacggagcaagaattgaaggatatttctgcactaaatgccaacatcagatttaatgatccatggacctggttggatggtaaattccccacttttgcctga

SEQ ID NO: 17 - protein, 327 aa, Saccharomyces cerevisiae
MSSLVTLNNGLKMPLVGLGCWKIDKKVCANQIYEAIKLGYRLFDGACDYGNEKEVGEGIRKAISEGLVSRKDIFVVSKLWNNFHHPDHVKLALKKTLSDMGLDYLDLYYIHFPIAFKYVPFEEKYPPGFYTGADDEKKGHITEAHVPIIDTYRALEECVDEGLIKSIGVSNFQGSLIQDLLRGCRIKPVALQIEHHPYLTQEHLVEFCKLHDIQVVAYSSFGPQSFIEMDLQLAKTTPTLFENDVIKKVSQNHPGSTTSQVLLRWATQRGIAVIPKSSKKERLLGNLEIEKKFTLTEQELKDISALNANIRFNDPWTWLDGKFPTFA

SEQ ID NO: 18 - DNA, 1164 bp, Escherichia coli
atgaacaactttaatctgcacaccccaacccgcattctgtttggtaaaggcgcaatcgctggtttacgcgaacaaattcctcacgatgctcgcgtattgattacctacggcggcggcagcgtgaaaaaaaccggcgttctcgatcaagttctggatgccctgaaaggcatggacgtgctggaatttggcggtattgagccaaacccggcttatgaaacgctgatgaacgccgtgaaactggttcgcgaacagaaagtgactttcctgctggcggttggcggcggttctgtactggacggcaccaaatttatcgccgcagcggctaactatccggaaaatatcgatccgtggcacattctgcaaacgggcggtaaagagattaaaagcgccatcccgatgggctgtgtgctgacgctgccagcaaccggttcagaatccaacgcagaagcggtgatctcccgtaaaaccacaggcgacaagcaggcgttccattctgcccatgttcagccggtatttgccgtgctcgatccggtttatacctacaccctgccgccgcgtcaggtggctaacggcgtagtggacgcctttgtacacaccgtggaacagtatgttaccaaaccggttgatgccaaaattcaggaccgtttcgcagaaggcattttgctgacgctaatcgaagatggtccgaaagccctgaaagagccagaaaactacgatgtgcgcgccaacgtcatgtgggcggcgactcaggcgctgaacggtttgattggcgctggcgtaccgcaggactgggcaacgcatatgctgggccacgaactgactgcgatgcacggtctggatcacgcgcaaacactggctatcgtcctgcctgcactgtggaatgaaaaacgcgataccaagcgcgctaagctgctgcaatatgctgaacgcgtctggaacatcactgaaggttccgatgatgagcgtattgacgccgcgattgccgcaacccgcaatttctttgagcaattaggcgtgccgacccacctctccgactacggtctggacggcagctccatcccggctttgctgaaaaaactggaagagcacggcatgacccaactgggcgaaaatcatgacattacgttggatgtcagccgccgtatatacgaagccgcccgctaa

SEQ ID NO: 19 - DNA, 1167 bp, Artificial Sequence
  Codon Optimized E. coli Sequence
atgaacaattttaatttgcatactccaactagaatattatttggaaaaggtgcaattgcaggtttaagggaacaaataccacatgatgcaagggtattaatcacatacggtggtggttctgtcaagaaaactggtgtattggatcaagtattggatgctttaaagggtatggatgtcttggaatttggaggaatcgaaccaaaccctgcttacgagactttaatgaatgctgtcaaattggtcagagaacaaaaggtaacattcttattggctgttggaggtggatcagtattagatggtacaaagttcattgctgctgcagcaaattatccagaaaacattgatccatggcatatattgcaaactggtggtaaggaaataaagtcagctatcccaatgggatgtgttttgacattgcctgcaacaggatcagaatcaaacgctgaagcagtcatctcaagaaagactacaggtgacaaacaggcattccattctgcccatgtccaacctgtatttgctgttttagaccctgtatacacttacacattaccaccaaggcaagtcgcaaatggagttgtcgatgcctttgttcacactgtagaacagtacgtcaccaaaccagtcgatgcaaagatccaggacaggtttgcagaaggtattttattgacattaatcgaagatggaccaaaagcattgaaagagccagagaactatgacgttagggcaaatgttatgtgggctgctacccaggcattgaacggtttaattggtgcaggagttccacaagattgggctacacacatgttgggtcacgagttgaccgccatgcacggtttggaccatgcacagactttagccattgttttgcctgccttatggaacgagaaaagagatactaagagggctaagttattacaatacgctgaaagggtttggaatatcaccgagggatctgatgatgaaaggattgatgccgctattgcagccactagaaacttctttgaacaattaggtgttccaactcacttgtctgactatggtttagatggatcatctattccagctttgttgaagaaattggaagagcacggtatgacccagttgggtgagaatcatgatataaccttagatgtatctaggagaatctacgaggctgctagataatga

SEQ ID NO: 20 - protein, 387 aa, Escherichia coli
MNNFNLHTPTRILFGKGAIAGLREQIPHDARVLITYGGGSVKKTGVLDQVLDALKGMDVLEFGGIEPNPAYETLMNAVKLVREQKVTFLLAVGGGSVLDGTKFIAAAANYPENIDPWHILQTGGKEIKSAIPMGCVLTLPATGSESNAEAVISRKTTGDKQAFHSAHVQPVFAVLDPVYTYTLPPRQVANGVVDAFVHTVEQYVTKPVDAKIQDRFAEGILLTLIEDGPKALKEPENYDVRANVMWAATQALNGLIGAGVPQDWATHMLGHELTAMHGLDHAQTLAIVLPALWNEKRDTKRAKLLQYAERVWNITEGSDDERIDAAIAATRNFFEQLGVPTHLSDYGLDGSSIPALLKKLEEHGMTQLGENHDITLDVSRRIYEAAR

SEQ ID NO: 21 - DNA, 1164 bp, Escherichia coli
atgaacaactttaatctgcacaccccaacccgcattctgtttggtaaaggcgcaatcgctggtttacgcgaacaaattcctcacgatgctcgcgtattgattacctacggcggcggcagcgtgaaaaaaaccggcgttctcgatcaagttctggatgccctgaaaggcatggacgtgctggaatttggcggtattgagccaaacccggcttatgaaacgctgatgaacgccgtgaaactggttcgcgaacagaaagtgactttcctgctggcggttggcggcggttctgtactggacggcaccaaatttatcgccgcagcggctaactatccggaaaatatcgatccgtggcacattctgcaaacgggcggtaaagagattaaaagcgccatcccgatgggctgtgtgctgacgctgccagcaaccggttcagaatccaacgcaggcgcggtgatctcccgtaaaaccacaggcgacaagcaggcgttccattctgcccatgttcagccggtatttgccgtgctcgatccggtttatacctacaccctgccgccgcgtcaggtggctaacggcgtagtggacgcctttgtacacaccgtggaacagtatgttaccaaaccggttgatgccaaaattcaggaccgtttcgcagaaggcattttgctgacgctaatcgaagatggtccgaaagccctgaaagagccagaaaactacgatgtgcgcgccaacgtcatgtgggcggcgactcaggcgctgaacggtttgattggcgctggcgtaccgcaggactgggcaacgcatatgctgggccacgaactgactgcgatgcacggtctggatcacgcgcaaacactggctatcgtcctgcctgcactgtggaatgaaaaacgcgataccaagcgcgctaagctgctgcaatatgctgaacgcgtctggaacatcactgaaggttccgatgatgagcgtattgacgccgcgattgccgcaacccgcaatttctttgagcaattaggcgtgccgacccacctctccgactacggtctggacggcagctccatcccggctttgctgaaaaaactggaagagcacggcatgacccaactgggcgaaaatcatgacattacgttggatgtcagccgccgtatatacgaagccgcccgctaa

SEQ ID NO: 22 - DNA, 1164 bp, Artificial Sequence; identical to SEQ ID NO: 21
  Codon Optimized E. coli Sequence

SEQ ID NO: 23 - protein, 387 aa, Escherichia coli
MNNFNLHTPTRILFGKGAIAGLREQIPHDARVLITYGGGSVKKTGVLDQVLDALKGMDVLEFGGIEPNPAYETLMNAVKLVREQKVTFLLAVGGGSVLDGTKFIAAAANYPENIDPWHILQTGGKEIKSAIPMGCVLTLPATGSESNAGAVISRKTTGDKQAFHSAHVQPVFAVLDPVYTYTLPPRQVANGVVDAFVHTVEQYVTKPVDAKIQDRFAEGILLTLIEDGPKALKEPENYDVRANVMWAATQALNGLIGAGVPQDWATHMLGHELTAMHGLDHAQTLAIVLPALWNEKRDTKRAKLLQYAERVWNITEGSDDERIDAAIAATRNFFEQLGVPTHLSDYGLDGSSIPALLKKLEEHGMTQLGENHDITLDVSRRIYEAAR

SEQ ID NO: 24 - DNA, 981 bp, Escherichia coli
atgaaaaagatacctttaggcacaacggatattacgctttcgcgaatggggttggggacatgggccattggcggcggtcctgcatggaatggcgatctcgatcggcaaatatgtattgatacgattcttgaagcccatcgttgtggcattaatctgattgatactgcgccaggatataactttggcaatagtgaagttatcgtcggtcaggcgttaaaaaaactgccccgtgaacaggttgtagtagaaaccaaatgcggcattgtctgggaacgaaaaggaagtttattcaacaaagttggcgatcggcagttgtataaaaacctttccccggaatctatccgcgaagaggtagcagcgagcttgcaacgtctgggtattgattacatcgatatctacatgacgcactggcagtcggtgccgccattttttacgccgatcgctgaaactgtcgcagtgcttaatgagttaaagtctgaagggaaaattcgcgctataggcgctgctaacgtcgatgctgaccatatccgcgagtatctgcaatatggtgaactggatattattcaggcgaaatacagtatcctcgaccgggcaatggaaaacgaactgctgccactatgtcgtgataatggcattgtggttcaggtttattccccgctagagcagggattgttgaccggcaccatcactcgtgattacgttccgggcggcgctcgggcaaataaagtctggttccagcgtgaaaacatgctgaaagtgattgatatgcttgaacagtggcagccactttgtgctcgttatcagtgcacaattcccactctggcactggcgtggatattaaaacagagtgatttaatctccattcttagtggggctactgcaccggaacaggtacgcgaaaatgtcgcggcactgaatatcaacttatcggatgcagacgcaacattgatgagggaaatggcagaggccctggagcgttaa

SEQ ID NO: 25 - protein, 326 aa, Escherichia coli
MKKIPLGTTDITLSRMGLGTWAIGGGPAWNGDLDRQICIDTILEAHRCGINLIDTAPGYNFGNSEVIVGQALKKLPREQVVVETKCGIVWERKGSLFNKVGDRQLYKNLSPESIREEVAASLQRLGIDYIDIYMTHWQSVPPFFTPIAETVAVLNELKSEGKIRAIGAANVDADHIREYLQYGELDIIQAKYSILDRAMENELLPLCRDNGIVVQVYSPLEQGLLTGTITRDYVPGGARANKVWFQRENMLKVIDMLEQWQPLCARYQCTIPTLALAWILKQSDLISILSGATAPEQVRENVAALNINLSDADATLMREMAEALER

SEQ ID NO: 26 - DNA, 1149 bp, Escherichia coli
atggctaacagaatgattctgaacgaaacggcatggtttggtcggggtgctgttggggctttaaccgatgaggtgaaacgccgtggttatcagaaggcgctgatcgtcaccgataaaacgctggtgcaatgcggcgtggtggcgaaagtgaccgataagatggatgctgcagggctggcatgggcgatttacgacggcgtagtgcccaacccaacaattactgtcgtcaaagaagggctcggtgtattccagaatagcggcgcggattacctgatcgctattggtggtggttctccacaggatacttgtaaagcgattggcattatcagcaacaacccggagtttgccgatgtgcgtagcctggaagggctttccccgaccaataaacccagtgtaccgattctggcaattcctaccacagcaggtactgcggcagaagtgaccattaactacgtgatcactgacgaagagaaacggcgcaagtttgtttgcgttgatccgcatgatatcccgcaggtggcgtttattgacgctgacatgatggatggtatgcctccagcgctgaaagctgcgacgggtgtcgatgcgctcactcatgctattgaggggtatattacccgtggcgcgtgggcgctaaccgatgcactgcacattaaagcgattgaaatcattgctggggcgctgcgaggatcggttgctggtgataaggatgccggagaagaaatggcgctcgggcagtatgttgcgggtatgggcttctcgaatgttgggttagggttggtgcatggtatggcgcatccactgggcgcgttttataacactccacacggtgttgcgaacgccatcctgttaccgcatgtcatgcgttataacgctgactttaccggtgagaagtaccgcgatatcgcgcgcgttatgggcgtgaaagtggaaggtatgagcctggaagaggcgcgtaatgccgctgttgaagcggtgtttgctctcaaccgtgatgtcggtattccgccacatttgcgtgatgttggtgtacgcaaggaagacattccggcactggcgcaggcggcactggatgatgtttgtaccggtggcaacccgcgtgaagcaacgcttgaggatattgtagagctttaccataccgcctggtaa

SEQ ID NO: 27 - DNA, 1149 bp, Artificial Sequence; identical to SEQ ID NO: 26
  Codon Optimized E. coli Sequence

SEQ ID NO: 28 - protein, 382 aa, Escherichia coli
MANRMILNETAWFGRGAVGALTDEVKRRGYQKALIVTDKTLVQCGVVAKVTDKMDAAGLAWAIYDGVVPNPTITVVKEGLGVFQNSGADYLIAIGGGSPQDTCKAIGIISNNPEFADVRSLEGLSPTNKPSVPILAIPTTAGTAAEVTINYVITDEEKRRKFVCVDPHDIPQVAFIDADMMDGMPPALKAATGVDALTHAIEGYITRGAWALTDALHIKAIEIIAGALRGSVAGDKDAGEEMALGQYVAGMGFSNVGLGLVHGMAHPLGAFYNTPHGVANAILLPHVMRYNADFTGEKYRDIARVMGVKVEGMSLEEARNAAVEAVFALNRDVGIPPHLRDVGVRKEDIPALAQAALDDVCTGGNPREATLEDIVELYHTAW

SEQ ID NO: 29 - DNA, 804 bp, Escherichia coli
atggctatccctgcatttggtttaggtactttccgtctgaaagacgacgttgttatttcatctgtgataacggcgcttgaacttggttatcgcgcaattgataccgcacaaatctatgataacgaagccgcagtaggtcaggcgattgcagaaagtggcgtgccacgtcatgaactctacatcaccactaaaatctggattgaaaatctcagcaaagacaaattgatcccaagtctgaaagagagcctgcaaaaattgcgtaccgattatgttgatctgacgctaatccactggccgtcaccaaacgatgaagtctctgttgaagagtttatgcaggcgctgctggaagccaaaaaacaagggctgacgcgtgagatcggtatttccaacttcacgatcccgttgatggaaaaagcgattgctgctgttggtgctgaaaacatcgctactaaccagattgaactctctccttatctgcaaaaccgtaaagtggttgcctgggctaaacagcacggcatccatattacttcctatatgacgctggcgtatggtaaggccctgaaagatgaggttattgctcgtatcgcagctaaacacaatgcgactccggcacaagtgattctggcgtgggctatgggggaaggttactcagtaattccttcttctactaaacgtaaaaacctggaaagtaatcttaaggcacaaaatttacagcttgatgccgaagataaaaaagcgatcgccgcactggattgcaacgaccgcctggttagcccggaaggtctggctcctgaatgggattaa

SEQ ID NO: 30 - protein, 267 aa, Escherichia coli
MAIPAFGLGTFRLKDDVVISSVITALELGYRAIDTAQIYDNEAAVGQAIAESGVPRHELYITTKIWIENLSKDKLIPSLKESLQKLRTDYVDLTLIHWPSPNDEVSVEEFMQALLEAKKQGLTREIGISNFTIPLMEKAIAAVGAENIATNQIELSPYLQNRKVVAWAKQHGIHITSYMTLAYGKALKDEVIARIAAKHNATPAQVILAWAMGEGYSVIPSSTKRKNLESNLKAQNLQLDAEDKKAIAALDCNDRLVSPEGLAPEWD

SEQ ID NO: 31 - DNA, 828 bp, Escherichia coli
atggctaatccaaccgttattaagctacaggatggcaatgtcatgccccagctgggactgggcgtctggcaagcaagtaatgaggaagtaatcaccgccattcaaaaagcgttagaagtgggttatcgctcgattgataccgccgcggcctacaagaacgaagaaggtgtcggcaaagccctgaaaaatgcctcagtcaacagagaagaactgttcatcaccactaagctgtggaacgacgaccacaagcgcccccgcgaagccctgctcgacagcctgaaaaaactccagcttgattatatcgacctctacttaatgcactggcccgttcccgctatcgaccattatgtcgaagcatggaaaggcatgatcgaattgcaaaaagagggattaatcaaaagcatcggcgtgtgcaacttccagatccatcacctgcaacgcctgattgatgaaactggcgtgacgcctgtgataaaccagatcgaacttcatccgctgatgcaacaacgccagctacacgcctggaacgcgacacacaaaatccagaccgaatcctggagcccattagcgcaaggagggaaaggcgttttcgatcagaaagtcattcgcgatctggcagataaatacggcaaaaccccggcgcagattgttatccgctggcatctggatagcggcctggtggtgatcccgaaatcggtcacaccttcacgtattgccgaaaactttgatgtctgggatttccgtctcgacaaagacgaactcggcgaaattgcaaaactcgatcagggcaagcgtctcggtcccgatcctgaccagttcggcggctaa

SEQ ID NO: 32 - protein, 275 aa, Escherichia coli
MANPTVIKLQDGNVMPQLGLGVWQASNEEVITAIQKALEVGYRSIDTAAAYKNEEGVGKALKNASVNREELFITTKLWNDDHKRPREALLDSLKKLQLDYIDLYLMHWPVPAIDHYVEAWKGMIELQKEGLIKSIGVCNFQIHHLQRLIDETGVTPVINQIELHPLMQQRQLHAWNATHKIQTESWSPLAQGGKGVFDQKVIRDLADKYGKTPAQIVIRWHLDSGLVVIPKSVTPSRIAENFDVWDFRLDKDELGEIAKLDQGKRLGPDPDQFGG

SEQ ID NO: 33 - DNA, 1179 bp, Clostridium acetobutylicum
atgaaagaagttgtaatagctagtgcagtaagaacagcgattggatcttatggaaagtctcttaaggatgtaccagcagtagatttaggagctacagctataaaggaagcagttaaaaaagcaggaataaaaccagaggatgttaatgaagtcattttaggaaatgttcttcaagcaggtttaggacagaatccagcaagacaggcatcttttaaagcaggattaccagttgaaattccagctatgactattaataaggtttgtggttcaggacttagaacagttagcttagcagcacaaattataaaagcaggagatgctgacgtaataatagcaggtggtatggaaaatatgtctagagctccttacttagcgaataacgctagatggggatatagaatgggaaacgctaaatttgttgatgaaatgatcactgacggattgtgggatgcatttaatgattaccacatgggaataacagcagaaaacatagctgagagatggaacatttcaagagaagaacaagatgagtttgctcttgcatcacaaaaaaaagctgaagaagctataaaatcaggtcaatttaaagatgaaatagttcctgtagtaattaaaggcagaaagggagaaactgtagttgatacagatgagcaccctagatttggatcaactatagaaggacttgcaaaattaaaacctgccttcaaaaaagatggaacagttacagctggtaatgcatcaggattaaatgactgtgcagcagtacttgtaatcatgagtgcagaaaaagctaaagagcttggagtaaaaccacttgctaagatagtttcttatggttcagcaggagttgacccagcaataatgggatatggacctttctatgcaacaaaagcagctattgaaaaagcaggttggacagttgatgaattagatttaatagaatcaaatgaagcttttgcagctcaaagtttagcagtagcaaaagatttaaaatttgatatgaataaagtaaatgtaaatggaggagctattgcccttggtcatccaattggagcatcaggtgcaagaatactcgttactcttgtacacgcaatgcaaaaaagagatgcaaaaaaaggcttagcaactttatgtataggtggcggacaaggaacagcaatattgctagaaaagtgctag

SEQ ID NO: 34 - DNA, 1179 bp, Artificial Sequence
  Codon Aoptimized Clostridium acetobutylicum Sequence
atgaaagaagttgttattgcgagcgcggttcgtaccgcgattggcagctatggcaagagcctgaaggatgttccggcggtggacctgggtgcgaccgcgatcaaagaggcggttaagaaagcgggcattaaaccggaggatgtgaacgaagttatcctgggtaacgtgctgcaagcgggtctgggccaaaacccggcgcgtcaggcgagcttcaaggcgggcctgccggttgaaatcccggcgatgaccattaacaaagtttgcggtagcggcctgcgtaccgtgagcctggcggcgcaaatcattaaggcgggtgacgcggatgttatcattgcgggtggcatggagaacatgagccgtgcgccgtacctggcgaacaacgcgcgttggggttatcgtatgggcaacgcgaaattcgtggacgaaatgattaccgacggtctgtgggatgcgtttaacgactaccacatgggcatcaccgcggagaacattgcggaacgttggaacattagccgtgaggaacaagatgagttcgcgctggcgagccagaagaaagcggaggaagcgatcaagagcggccagtttaaagacgaaatcgttccggtggttattaagggtcgtaagggtgaaaccgtggtggacaccgatgaacacccgcgtttcggtagcaccattgagggcctggcgaagctgaaaccggcgtttaagaaagatggcaccgtgaccgcgggtaacgcgagcggcctgaacgactgcgcggcggtgctggttatcatgagcgcggagaaggcgaaagaactgggtgtgaagccgctggcgaaaattgttagctacggtagcgcgggtgtggacccggcgatcatgggttacggcccgttttatgcgaccaaggcggcgattgagaaagcgggttggaccgtggacgaactggatctgatcgagagcaacgaagcgttcgcggcgcaaagcctggcggtggcgaaggatctgaaatttgacatgaacaaggtgaacgtgaacggtggtgcgattgcgctgggtcacccgattggtgcgagcggcgcgcgtatcctggtgaccctggttcacgcgatgcagaaacgtgacgcgaagaaaggtctggcgaccctgtgcattggtggtggtcaaggcaccgcgattctgctggaaaagtgctaa

SEQ ID NO: 35 - protein, 392 aa, Clostridium acetobutylicum
MKEVVIASAVRTAIGSYGKSLKDVPAVDLGATAIKEAVKKAGIKPEDVNEVILGNVLQAGLGQNPARQASFKAGLPVEIPAMTINKVCGSGLRTVSLAAQIIKAGDADVIIAGGMENMSRAPYLANNARWGYRMGNAKFVDEMITDGLWDAFNDYHMGITAENIAERWNISREEQDEFALASQKKAEEAIKSGQFKDEIVPVVIKGRKGETVVDTDEHPRFGSTIEGLAKLKPAFKKDGTVTAGNASGLNDCAAVLVIMSAEKAKELGVKPLAKIVSYGSAGVDPAIMGYGPFYATKAAIEKAGWTVDELDLIESNEAFAAQSLAVAKDLKFDMNKVNVNGGAIALGHPIGASGARILVTLVHAMQKRDAKKGLATLCIGGGQGTAILLEKC

SEQ ID NO: 36 - DNA, 1185 bp, Escherichia coli
atgaaaaattgtgtcatcgtcagtgcggtacgtactgctatcggtagttttaacggttcactcgcttccaccagcgccatcgacctgggggcgacagtaattaaagccgccattgaacgtgcaaaaatcgattcacaacacgttgatgaagtgattatgggtaacgtgttacaagccgggctggggcaaaatccggcgcgtcaggcactgttaaaaagcgggctggcagaaacggtgtgcggattcacggtcaataaagtatgtggttcgggtcttaaaagtgtggcgcttgccgcccaggccattcaggcaggtcaggcgcagagcattgtggcggggggtatggaaaatatgagtttagccccctacttactcgatgcaaaagcacgctctggttatcgtcttggagacggacaggtttatgacgtaatcctgcgcgatggcctgatgtgcgccacccatggttatcatatggggattaccgccgaaaacgtggctaaagagtacggaattacccgtgaaatgcaggatgaactggcgctacattcacagcgtaaagcggcagccgcaattgagtccggtgcttttacagccgaaatcgtcccggtaaatgttgtcactcgaaagaaaaccttcgtcttcagtcaagacgaattcccgaaagcgaattcaacggctgaagcgttaggtgcattgcgcccggccttcgataaagcaggaacagtcaccgctgggaacgcgtctggtattaacgacggtgctgccgctctggtgattatggaagaatctgcggcgctggcagcaggccttacccccctggctcgcattaaaagttatgccagcggtggcgtgccccccgcattgatgggtatggggccagtacctgccacgcaaaaagcgttacaactggcggggctgcaactggcggatattgatctcattgaggctaatgaagcatttgctgcacagttccttgccgttgggaaaaacctgggctttgattctgagaaagtgaatgtcaacggcggggccatcgcgctcgggcatcctatcggtgccagtggtgctcgtattctggtcacactattacatgccatgcaggcacgcgataaaacgctggggctggcaacactgtgcattggcggcggtcagggaattgcgatggtgattgaacggttgaattaa

SEQ ID NO: 37 - protein, 394 aa, Escherichia coli
MKNCVIVSAVRTAIGSFNGSLASTSAIDLGATVIKAAIERAKIDSQHVDEVIMGNVLQAGLGQNPARQALLKSGLAETVCGFTVNKVCGSGLKSVALAAQAIQAGQAQSIVAGGMENMSLAPYLLDAKARSGYRLGDGQVYDVILRDGLMCATHGYHMGITAENVAKEYGITREMQDELALHSQRKAAAAIESGAFTAEIVPVNVVTRKKTFVFSQDEFPKANSTAEALGALRPAFDKAGTVTAGNASGINDGAAALVIMEESAALAAGLTPLARIKSYASGGVPPALMGMGPVPATQKALQLAGLQLADIDLIEANEAFAAQFLAVGKNLGFDSEKVNVNGGAIALGHPIGASGARILVTLLHAMQARDKTLGLATLCIGGGQGIAMVIERLN

SEQ ID NO: 38 - DNA, 1197 bp, Saccharomyces cerevisiae
atgtctcagaacgtttacattgtatcgactgccagaaccccaattggttcattccagggttctctatcctccaagacagcagtggaattgggtgctgttgctttaaaaggcgccttggctaaggttccagaattggatgcatccaaggattttgacgaaattatttttggtaacgttctttctgccaatttgggccaagctccggccagacaagttgctttggctgccggtttgagtaatcatatcgttgcaagcacagttaacaaggtctgtgcatccgctatgaaggcaatcattttgggtgctcaatccatcaaatgtggtaatgctgatgttgtcgtagctggtggttgtgaatctatgactaacgcaccatactacatgccagcagcccgtgcgggtgccaaatttggccaaactgttcttgttgatggtgtcgaaagagatgggttgaacgatgcgtacgatggtctagccatgggtgtacacgcagaaaagtgtgcccgtgattgggatattactagagaacaacaagacaattttgccatcgaatcctaccaaaaatctcaaaaatctcaaaaggaaggtaaattcgacaatgaaattgtacctgttaccattaagggatttagaggtaagcctgatactcaagtcacgaaggacgaggaacctgctagattacacgttgaaaaattgagatctgcaaggactgttttccaaaaagaaaacggtactgttactgccgctaacgcttctccaatcaacgatggtgctgcagccgtcatcttggtttccgaaaaagttttgaaggaaaagaatttgaagcctttggctattatcaaaggttggggtgaggccgctcatcaaccagctgattttacatgggctccatctcttgcagttccaaaggctttgaaacatgctggcatcgaagacatcaattctgttgattactttgaattcaatgaagccttttcggttgtcggtttggtgaacactaagattttgaagctagacccatctaaggttaatgtatatggtggtgctgttgctctaggtcacccattgggttgttctggtgctagagtggttgttacactgctatccatcttacagcaagaaggaggtaagatcggtgttgccgccatttgtaatggtggtggtggtgcttcctctattgtcattgaaaagatatga

SEQ ID NO: 39 - DNA, 1197 bp, Artificial Sequence; identical to SEQ ID NO: 38
  Codon Optimized Sacharomyces cerevisiae Sequence

SEQ ID NO: 40 - protein, 398 aa, Saccharomyces cerevisiae
MSQNVYIVSTARTPIGSFQGSLSSKTAVELGAVALKGALAKVPELDASKDFDEIIFGNVLSANLGQAPARQVALAAGLSNHIVASTVNKVCASAMKAIILGAQSIKCGNADVVVAGGCESMTNAPYYMPAARAGAKFGQTVLVDGVERDGLNDAYDGLAMGVHAEKCARDWDITREQQDNFAIESYQKSQKSQKEGKFDNEIVPVTIKGFRGKPDTQVTKDEEPARLHVEKLRSARTVFQKENGTVTAANASPINDGAAAVILVSEKVLKEKNLKPLAIIKGWGEAAHQPADFTWAPSLAVPKALKHAGIEDINSVDYFEFNEAFSVVGLVNTKILKLDPSKVNVYGGAVALGHPLGCSGARVVVTLLSILQQEGGKIGVAAICNGGGGASSIVIEKI

SEQ ID NO: 41 - DNA, 651 bp, Escherichia coli
atggatgcgaaacaacgtattgcgcgccgtgtggcgcaagagcttcgtgatggtgacatcgttaacttagggatcggtttacccacaatggtcgccaattatttaccggagggtattcatatcactctgcaatcggaaaacggcttcctcggtttaggcccggtcacgacagcgcatccagatctggtgaacgctggcgggcaaccgtgcggtgttttacccggtgcagccatgtttgatagcgccatgtcatttgcgctaatccgtggcggtcatattgatgcctgcgtgctcggcggtttgcaagtagacgaagaagcaaacctcgcgaactgggtagtgcctgggaaaatggtgcccggtatgggtggcgcgatggatctggtgaccgggtcgcgcaaagtgatcatcgccatggaacattgcgccaaagatggttcagcaaaaattttgcgccgctgcaccatgccactcactgcgcaacatgcggtgcatatgctggttactgaactggctgtctttcgttttattgacggcaaaatgtggctcaccgaaattgccgacgggtgtgatttagccaccgtgcgtgccaaaacagaagctcggtttgaagtcgccgccgatctgaatacgcaacggggtgatttatga

SEQ ID NO: 42 - DNA, 651 bp, Artificial Sequence; identical to SEQ ID NO: 41
  Codon Optimized E. coli Sequence

SEQ ID NO: 43 - protein, 216 aa, Escherichia coli
MDAKQRIARRVAQELRDGDIVNLGIGLPTMVANYLPEGIHITLQSENGFLGLGPVTTAHPDLVNAGGQPCGVLPGAAMFDSAMSFALIRGGHIDACVLGGLQVDEEANLANWVVPGKMVPGMGGAMDLVTGSRKVIIAMEHCAKDGSAKILRRCTMPLTAQHAVHMLVTELAVFRFIDGKMWLTEIADGCDLATVRAKTEARFEVAADLNTQRGDL

SEQ ID NO: 44 - DNA, 663 bp, Escherichia coli
atgaaaacaaaattgatgacattacaagacgccaccggcttctttcgtgacggcatgaccatcatggtgggcggatttatggggattggcactccatcccgcctggttgaagcattactggaatctggtgttcgcgacctgacattgatagccaatgataccgcgtttgttgataccggcatcggtccgctcatcgtcaatggtcgagtccgcaaagtgattgcttcacatatcggcaccaacccggaaacaggtcggcgcatgatatctggtgagatggacgtcgttctggtgccgcaaggtacgctaatcgagcaaattcgctgtggtggagctggacttggtggttttctcaccccaacgggtgtcggcaccgtcgtagaggaaggcaaacagacactgacactcgacggtaaaacctggctgctcgaacgcccactgcgcgccgacctggcgctaattcgcgctcatcgttgcgacacacttggcaacctgacctatcaacttagcgcccgcaactttaaccccctgatagcccttgcggctgatatcacgctggtagagccagatgaactggtcgaaaccggcgagctgcaacctgaccatattgtcacccctggtgccgttatcgaccacatcatcgtttcacaggagagcaaataa

SEQ ID NO: 45 - DNA, 663 bp, Artificial Sequence; identical to SEQ ID NO: 44
  Codon Optimized E. coli Sequence

SEQ ID NO: 46 - protein, 220 aa, Escherichia coli
MKTKLMTLQDATGFFRDGMTIMVGGFMGIGTPSRLVEALLESGVRDLTLIANDTAFVDTGIGPLIVNGRVRKVIASHIGTNPETGRRMISGEMDVVLVPQGTLIEQIRCGGAGLGGFLTPTGVGTVVEEGKQTLTLDGKTWLLERPLRADLALIRAHRCDTLGNLTYQLSARNFNPLIALAADITLVEPDELVETGELQPDHIVTPGAVIDHIIVSQESK

SEQ ID NO: 47 - DNA, 735 bp, Clostridium acetobutylicum
atgttaaaggatgaagtaattaaacaaattagcacgccattaacttcgcctgcatttcctagaggaccctataaatttcataatcgtgagtattttaacattgtatatcgtacagatatggatgcacttcgtaaagttgtgccagagcctttagaaattgatgagcccttagtcaggtttgaaattatggcaatgcatgatacgagtggacttggttgttatacagaaagcggacaggctattcccgtaagctttaatggagttaagggagattatcttcatatgatgtatttagataatgagcctgcaattgcagtaggaagggaattaagtgcatatcctaaaaagctcgggtatccaaagctttttgtggattcagatactttagtaggaactttagactatggaaaacttagagttgcgacagctacaatggggtacaaacataaagccttagatgctaatgaagcaaaggatcaaatttgtcgccctaattatatgttgaaaataatacccaattatgatggaagccctagaatatgtgagcttataaatgcgaaaatcacagatgttaccgtacatgaagcttggacaggaccaactcgactgcagttatttgatcacgctatggcgccacttaatgatttgccagtaaaagagattgtttctagctctcacattcttgcagatataatattgcctagagctgaagttatatatgattatcttaagtaa

SEQ ID NO: 48 - DNA, 735 bp, Artificial Sequence
  Codon Optimized Clostridium acetobutylicum Sequence
atgctgaaggacgaggttattaagcagattagcaccccgctgaccagcccggcgttcccgcgtggtccgtacaagttccataatcgcgaatacttcaacattgtgtatcgtaccgacatggatgcgctgcgtaaggtggttccggagccgctggaaattgacgagccgctggttcgtttcgaaatcatggcgatgcacgataccagcggtctgggctgctacaccgagagcggtcaggcgattccggtgagctttaacggtgttaaaggcgactacctgcacatgatgtatctggataacgaaccggcgattgcggtgggtcgtgagctgagcgcgtacccgaagaaactgggctatccgaagctgttcgtggacagcgataccctggtgggcaccctggactacggcaaactgcgtgttgcgaccgcgaccatgggctataagcacaaagcgctggacgcgaacgaagcgaaggatcagatttgccgtccgaactacatgctgaaaatcattccgaactatgacggtagcccgcgtatctgcgaactgattaacgcgaagatcaccgatgttaccgttcatgaggcgtggaccggcccgacccgtctgcaactgtttgaccacgcgatggcgccgctgaacgatctgccggtgaaagagatcgttagcagcagccacatcctggcggacatcatcctgccgcgtgcggaagttatctacgattacctgaagtaa

SEQ ID NO: 49 - protein, 244 aa, Clostridium acetobutylicum
MLKDEVIKQISTPLTSPAFPRGPYKFHNREYFNIVYRTDMDALRKVVPEPLEIDEPLVRFEIMAMHDTSGLGCYTESGQAIPVSFNGVKGDYLHMMYLDNEPAIAVGRELSAYPKKLGYPKLFVDSDTLVGTLDYGKLRVATATMGYKHKALDANEAKDQICRPNYMLKIIPNYDGSPRICELINAKITDVTVHEAWTGPTRLQLFDHAMAPLNDLPVKEIVSSSHILADIILPRAEVIYDYLK

SEQ ID NO: 50 - DNA, 741 bp, Clostridium beijerinckii
atgttagaaagtgaagtatctaaacaaattacaactccacttgctgctccagcgtttcctagaggaccatataggtttcacaatagagaatatctaaacattatttatcgaactgatttagatgctcttcgaaaaatagtaccagagccacttgaattagatagagcatatgttagatttgaaatgatggctatgcctgatacaaccggactaggctcatatacagaatgtggtcaagctattccagtaaaatataatggtgttaagggtgactacttgcatatgatgtatctagataatgaacctgctattgctgttggaagagaaagtagcgcttatccaaaaaagcttggctatccaaagctatttgttgattcagatactttagttgggacacttaaatatggtacattaccagtagctactgcaacaatgggatataagcacgagcctctagatcttaaagaagcctatgctcaaattgcaagacccaattttatgctaaaaatcattcaaggttacgatggtaagccaagaatttgtgaactaatatgtgcagaaaatactgatataactattcacggtgcttggactggaagtgcacgtctacaattatttagccatgcactagctcctcttgctgatttacctgtattagagattgtatcagcatctcatatcctcacagatttaactcttggaacacctaaggttgtacatgattatctttcagtaaaataa

SEQ ID NO: 51 - DNA, 741 bp, Artificial Sequence
  Codon Optimized Clostridium beijerinckii Sequence
atgctggagagcgaagttagcaaacaaatcaccaccccgctggcggcgccggcgttcccgcgtggcccgtaccgttttcataaccgtgagtacctgaacatcatttatcgtaccgacctggatgcgctgcgtaagattgtgccggagccgctggaactggaccgtgcgtacgttcgtttcgagatgatggcgatgccggataccaccggtctgggcagctacaccgaatgcggtcaggcgatcccggtgaagtataacggtgttaaaggcgactacctgcacatgatgtatctggataacgagccggcgattgcggtgggtcgtgaaagcagcgcgtacccgaagaaactgggctatccgaagctgtttgtggacagcgataccctggtgggcaccctgaaatatggcaccctgccggttgcgaccgcgaccatgggctacaagcacgagccgctggacctgaaagaagcgtatgcgcagattgcgcgtccgaacttcatgctgaagatcattcaaggttatgacggcaaaccgcgtatctgcgagctgatttgcgcggaaaacaccgatatcaccatccatggtgcgtggaccggcagcgcgcgtctgcaactgtttagccatgcgctggcgccgctggcggatctgccggtgctggaaatcgttagcgcgagccacattctgaccgatctgaccctgggcaccccgaaggttgtgcatgactatctgagcgtgaagtaa

SEQ ID NO: 52 - protein, 246 aa, Clostridium beijerinckii
MLESEVSKQITTPLAAPAFPRGPYRFHNREYLNIIYRTDLDALRKIVPEPLELDRAYVRFEMMAMPDTTGLGSYTECGQAIPVKYNGVKGDYLHMMYLDNEPAIAVGRESSAYPKKLGYPKLFVDSDTLVGTLKYGTLPVATATMGYKHEPLDLKEAYAQIARPNFMLKIIQGYDGKPRICELICAENTDITIHGAWTGSARLQLFSHALAPLADLPVLEIVSASHILTDLTLGTPKVVHDYLSVK

SEQ ID NO: 53 - DNA, 770 bp, Homo sapiens
atggaagagaagcagatcctgtgcgtggggctagtggtgctggacgtcatcagcctggtggacaagtaccctaaggaggactcggagataaggtgtttgtcccagagatggcagcgcggaggcaacgcgtccaactcctgcaccgttctctccctgctcggagccccctgtgccttcatgggctcaatggctcctggccatgttgctgattttgtcctggatgacctccgccgctattctgtggacctacgctacacagtctttcagaccacaggctccgtccccatcgccacggtcatcatcaacgaggccagtggtagccgcaccatcctatactatgacaggagcctgccagatgtgtctgctacagactttgagaaggttgatctgacccagttcaagtggatccacattgagggccggaacgcatcggagcaggtgaagatgctgcagcggatagacgcacacaacaccaggcagcctccagagcagaagatccgggtgtccgtggaggtggagaagccacgagaggagctcttccagctgtttggctacggagacgtggtgtttgtcagcaaagatgtggccaagcacttggggttccagtcagcagaggaagccttgaggggcttgtatggtcgtgtgaggaaaggggctgtgcttgtctgtgcctgggctgaggagggcgccgacgccctgggccctgatggcaaattgctccactcggatgctttcccgccaccccgcgtggtggatacactgggagctgg

SEQ ID NO: 54 - DNA, 897 bp, Artificial Sequence
  Codon Optimized Homo sapiens Sequence
atggaggaaaagcaaattctgtgcgttggtctggtggttctggacgtgattagcctggttgataagtacccgaaagaggatagcgaaatccgttgcctgagccagcgttggcaacgtggtggcaacgcgagcaatagctgcaccgttctgagcctgctgggtgcgccgtgcgcgttcatgggtagcatggcgccgggtcatgttgcggacttcctggtggcggattttcgtcgtcgtggtgtggacgttagccaggttgcgtggcaaagcaagggcgataccccgagctcctgctgcatcattaacaacagcaacggtaaccgtaccattgtgctgcacgacaccagcctgccggatgttagcgcgaccgacttcgagaaggtggatctgacccagtttaaatggattcacattgagggccgtaacgcgagcgaacaggttaaaatgctgcaacgtattgatgcgcacaacacccgtcagccgccggaacaaaagattcgtgtgagcgttgaggtggaaaaaccgcgtgaggaactgttccaactgtttggttacggcgacgtggttttcgttagcaaggatgtggcgaaacacctgggttttcaaagcgcggaggaagcgctgcgtggtctgtatggccgtgtgcgtaaaggcgcggttctggtgtgcgcgtgggcggaggaaggcgcggatgcgctgggtccggatggcaaactgctgcacagcgatgcgttcccgccgccgcgtgtggttgacaccctgggtgcgggcgataccttcaacgcgagcgttatctttagcctgagccagggccgtagcgtgcaagaggcgctgcgtttcggctgccaagttgcgggtaaaaaatgcggtctgcaaggctttgacggtatcgtgtaa

SEQ ID NO: 55 - protein, 298 aa, Homo sapiens
MEEKQILCVGLVVLDVISLVDKYPKEDSEIRCLSQRWQRGGNASNSCTVLSLLGAPCAFMGSMAPGHVADFLVADFRRRGVDVSQVAWQSKGDTPSSCCIINNSNGNRTIVLHDTSLPDVSATDFEKVDLTQFKWIHIEGRNASEQVKMLQRIDAHNTRQPPEQKIRVSVEVEKPREELFQLFGYGDVVFVSKDVAKHLGFQSAEEALRGLYGRVRKGAVLVCAWAEEGADALGPDGKLLHSDAFPPPRVVDTLGAGDTFNASVIFSLSQGRSVQEALRFGCQVAGKKCGLQGFDGIV

SEQ ID NO: 56 - DNA, 1095 bp, Homo sapiens
atggcccaccgatttccagccctcacccaggagcagaagaaggagctctcagaaattgcccagagcattgttgccaatggaaaggggatcctggctgcagatgaatctgtaggtaccatggggaaccgcctgcagaggatcaaggtggaaaacactgaagagaaccgccggcagttccgagaaatcctcttctctgtggacagttccatcaaccagagcatcgggggtgtgatccttttccacgagaccctctaccagaaggacagccagggaaagctgttcagaaacatcctcaaggaaaaggggatcgtggtgggaatcaagttagaccaaggaggtgctcctcttgcaggaacaaacaaagaaaccaccattcaagggcttgatggcctctcagagcgctgtgctcagtacaagaaagatggtgttgactttgggaagtggcgtgctgtgctgaggattgccgaccagtgtccatccagcctcgctatccaggaaaacgccaacgccctggctcgctacgccagcatctgtcagcagaatggactggtacctattgttgaaccagaggtaattcctgatggagaccatgacctggaacactgccagtatgttactgagaaggtcctggctgctgtctacaaggccctgaatgaccatcatgtttacctggagggcaccctgctaaagcccaacatggtgactgctggacatgcctgcaccaagaagtatactccagaacaagtagctatggccaccgtaacagctctccaccgtactgttcctgcagctgttcctggcatctgctttttgtctggtggcatgagtgaagaggatgccactctcaacctcaatgctatcaacctttgccctctaccaaagccctggaaactaagtttctcttatggacgggccctgcaggccagtgcactggctgcctggggtggcaaggctgcaaacaaggaggcaacccaggaggcttttatgaagcgggccatggctaactgccaggcggccaaaggacagtatgttcacacgggttcttctggggctgcttccacccagtcgctcttcacagcctgctatacctactag

SEQ ID NO: 57 - DNA, 1095 bp, Artificial Sequence
  Codon Optimized Homo sapiens Sequence
atggcgcaccgttttccggcgctgacccaagagcagaagaaggagctgagcgagattgcgcagagcatcgtggcgaatggtaaaggtattctggcggcggatgagagcgttggtaccatgggcaaccgtctgcagcgtattaaggtggagaacaccgaggaaaaccgtcgtcaattccgtgaaatcctgtttagcgttgatagcagcatcaaccagagcattggtggcgtgatcctgttccacgaaaccctgtaccagaaggacagccaaggtaaactgtttcgtaacattctgaaggaaaaaggtattgtggttggcatcaagctggatcaaggtggcgcgccgctggcgggcaccaacaaggaaaccaccatccagggtctggacggcctgagcgaacgttgcgcgcaatataagaaagatggtgttgacttcggcaagtggcgtgcggtgctgcgtattgcggaccagtgcccgagcagcctggcgatccaagaaaacgcgaacgcgctggcgcgttacgcgagcatctgccagcaaaacggtctggtgccgattgttgagccggaagttatcccggacggcgatcacgacctggagcactgccagtatgtgaccgaaaaggttctggcggcggtgtacaaagcgctgaacgatcaccacgtttatctggagggtaccctgctgaaaccgaacatggtgaccgcgggccatgcgtgcaccaagaaatacaccccggaacaggtggcgatggcgaccgtgaccgcgctgcaccgtaccgttccggcggcggtgccgggtatttgctttctgagcggtggcatgagcgaagaggacgcgaccctgaacctgaacgcgatcaacctgtgcccgctgccgaagccgtggaaactgagcttcagctacggccgtgcgctgcaggcgagcgcgctggcggcgtggggtggcaaggcggcgaacaaagaggcgacccaagaagcgtttatgaagcgtgcgatggcgaactgccaggcggcgaaaggtcaatatgtgcataccggcagcagcggtgcggcgagcacccagagcctgtttaccgcgtgctatacctattaa

SEQ ID NO: 58 - protein, 364 aa, Homo sapiens
MAHRFPALTQEQKKELSEIAQSIVANGKGILAADESVGTMGNRLQRIKVENTEENRRQFREILFSVDSSINQSIGGVILFHETLYQKDSQGKLFRNILKEKGIVVGIKLDQGGAPLAGTNKETTIQGLDGLSERCAQYKKDGVDFGKWRAVLRIADQCPSSLAIQENANALARYASICQQNGLVPIVEPEVIPDGDHDLEHCQYVTEKVLAAVYKALNDHHVYLEGTLLKPNMVTAGHACTKKYTPEQVAMATVTALHRTVPAAVPGICFLSGGMSEEDATLNLNAINLCPLPKPWKLSFSYGRALQASALAAWGGKAANKEATQEAFMKRAMANCQAAKGQYVHTGSSGAASTQSLFTACYTY

SEQ ID NO: 59 - DNA, 747 bp, Caulobacter crescentus
atgtcctcagccatctatcccagcctgaagggcaagcgcgtcgtcatcaccggcggcggctcgggcatcggggccggcctcaccgccggcttcgcccgtcagggcgcggaggtgatcttcctcgacatcgccgacgaggactccagggctcttgaggccgagctggccggctcgccgatcccgccggtctacaagcgctgcgacctgatgaacctcgaggcgatcaaggcggtcttcgccgagatcggcgacgtcgacgtgctggtcaacaacgccggcaatgacgaccgccacaagctggccgacgtgaccggcgcctattgggacgagcggatcaacgtcaacctgcgccacatgctgttctgcacccaggccgtcgcgccgggcatgaagaagcgtggcggcggggcggtgatcaacttcggttcgatcagctggcacctggggcttgaggacctcgtcctctacgaaaccgccaaggccggcatcgaaggcatgacccgcgcgctggcccgggagctgggtcccgacgacatccgcgtcacctgcgtggtgccgggcaacgtcaagaccaagcgccaggagaagtggtacacgcccgaaggcgaggcccagatcgtggcggcccaatgcctgaagggccgcatcgtcccggagaacgtcgccgcgctggtgctgttcctggcctcggatgacgcgtcgctctgcaccggccacgaatactggatcgacgccggctggcgttga

SEQ ID NO: 60 - DNA, 747 bp, Artificial Sequence
  Codon Optimized Caulobacter crescentus Sequence
atgagcagcgcgatctacccgagcctgaaaggtaaacgtgtggtgattaccggcggcggcagcggcattggtgcgggcctgaccgcgggcttcgcgcgtcagggtgcggaagtgatctttctggacattgcggacgaagatagccgtgcgctggaggcggaactggcgggcagcccgatcccgccggtgtacaagcgttgcgatctgatgaacctggaggcgatcaaagcggttttcgcggaaattggcgacgtggatgttctggtgaacaacgcgggtaacgacgaccgtcacaagctggcggatgtgaccggtgcgtattgggatgagcgtattaacgttaacctgcgtcacatgctgttctgcacccaggcggtggcgccgggtatgaagaaacgtggtggcggtgcggttatcaactttggcagcattagctggcacctgggtctggaggacctggtgctgtacgaaaccgcgaaagcgggcatcgagggtatgacccgtgcgctggcgcgtgaactgggtccggacgatattcgtgtgacctgcgtggttccgggtaacgttaagaccaaacgtcaagagaagtggtataccccggagggtgaagcgcagattgttgcggcgcaatgcctgaaaggtcgtattgttccggaaaacgtggcggcgctggttctgtttctggcgagcgatgatgcgagcctgtgcaccggccatgagtattggattgatgcgggctggcgttaa

SEQ ID NO: 61 - protein, 248 aa, Caulobacter crescentus
MSSAIYPSLKGKRVVITGGGSGIGAGLTAGFARQGAEVIFLDIADEDSRALEAELAGSPIPPVYKRCDLMNLEAIKAVFAEIGDVDVLVNNAGNDDRHKLADVTGAYWDERINVNLRHMLFCTQAVAPGMKKRGGGAVINFGSISWHLGLEDLVLYETAKAGIEGMTRALARELGPDDIRVTCVVPGNVKTKRQEKWYTPEGEAQIVAAQCLKGRIVPENVAALVLFLASDDASLCTGHEYWIDAGWR

SEQ ID NO: 62 - DNA, 1173 bp, Haloferax volcanii
atgagccccgcccccaccgacatcgtcgaggagttcacgcgccgcgactggcagggagacgacgtgacgggcaccgtgcgggtcgccatgatcggcctcggctggtggacccgcgacgaggcgattcccgcggtcgaggcgtccgagttctgcgagacgacggtcgtcgtcagcagttcgaaggagaaagccgagggcgcgacggcgttgaccgagtcgataacccacggcctcacctacgacgagttccacgagggggtcgccgccgacgcctacgacgcggtgtacgtcgtcacgccgaacggtctgcatctcccgtacgtcgagaccgccgccgagttggggaaggcggtcctctgcgagaaaccgctggaagcgtcggtcgagcgggccgaaaagctcgtcgccgcctgcgaccgcgccgacgtgcccctgatggtcgcctatcggatgcagaccgagccggccgtccggcgcgcccgcgaactcgtcgaggccggcgtcatcggcgagccggtgttcgtccacggccacatgtcccagcgcctgctcgacgaggtcgtccccgaccccgaccagtggcggctcgaccccgaactctccggcggcgcgaccgtcatggacatcgggctctacccgctgaacaccgcccggttcgtcctcgacgccgaccccgtccgcgtcagggcgaccgcccgcgtcgacgacgaggcgttcgaggccgtcggcgacgagcacgtcagtttcggcgtcgacttcgacgacggcacgctcgcggtctgcaccgccagccagtcggcttaccagttgagccacctccgggtgaccggcaccgagggcgaactcgaaatcgagcccgcgttctacaaccgccaaaagcggggattccgactgtcgtggggggaccagtccgccgactacgacttcgagcaggtaaaccagatgacggaggagttcgactacttcgcgtcccggctcctgtcggattccgaccccgcgcccgacggcgaccacgcgctcgtggacatgcgcgcgatggacgcgatttacgccgcggcggagcgcgggaccgatgtcgccgtcgacgccgccgactccgattccgccgactccgattccgccgacgctgccgccgccaaccacgacgccgaccccgattccgacgggacgtag

SEQ ID NO: 63 - protein, 390 aa, Haloferax volcanii
MSPAPTDIVEEFTRRDWQGDDVTGTVRVAMIGLGWWTRDEAIPAVEASEFCETTVVVSSSKEKAEGATALTESITHGLTYDEFHEGVAADAYDAVYVVTPNGLHLPYVETAAELGKAVLCEKPLEASVERAEKLVAACDRADVPLMVAYRMQTEPAVRRARELVEAGVIGEPVFVHGHMSQRLLDEVVPDPDQWRLDPELSGGATVMDIGLYPLNTARFVLDADPVRVRATARVDDEAFEAVGDEHVSFGVDFDDGTLAVCTASQSAYQLSHLRVTGTEGELEIEPAFYNRQKRGFRLSWGDQSADYDFEQVNQMTEEFDYFASRLLSDSDPAPDGDHALVDMRAMDAIYAAAERGTDVAVDAADSDSADSDSADAAAANHDADPDSDGT

SEQ ID NO: 64 - DNA, 1176 bp, Unknown
  Trichoderma reesei Sequence
atggcgtctggaaacccttacaccctgaaatggggcatcatggccaccggcggaatcgcagagaccttctgcaaggatctcctgtgcaaccccgcgattcgaggcgccgatgatgtgcgccacgagattgtggccgtggcctcttccagcagcagcaagagagcagaggagttcctccagagaatcgacggtgcctttgacgccaagacgtacggatcatacccggaacttgtggcagaccccaacgtcgacatcgtctatgtggcaactccccacagccaccacttccagaacaccatgctggcgctggaagccggcaagaacgtcttgtgcgaaaaggctttcaccgtgacggccgcgcaggcccgaaagctggttgagacggccaaggccaagaagctcttcctgatggaagctgtgtggacacggtactttccgctgagtatcaagattcgagagctcattgccgccggcgagattggcactgtctttcgaacaatcgccgacttgtccatcaacgcaaactcagagcagggtcaagccctgaaattcgcagactcacatcgaatggtcaacccggacctcgcaggcggtgccaccttggatctcggagtctatcccttgacctgggtgttccagaccctgtatcatttgcaaccggaggaagacaaggaggctcccaccgtggttgcttccagcaacaagtacaccactggcgcagacgagaataccgccatcatctgcagcttccctcgccacaacagcattggaattgcttcgacgacgatgagggcggacaccgaccccgagaaggacaccattccggcggtccgaattcaaggatccaagggagaaatccaagtcttcttcccgacctaccgaccgctcaagtacaaggtggtgaagacgaacggcgaggcgcagacggttgactgccccatccccggagaccccgcgcgcaagggctcgggccacggaatgttctgggaggcggacgagtgtgctcgatgccttcgcgatggcaagttggagagtgccacgttgccatggaaggagagcattgtcattatggaaacgatggaggaggcgctgaggcagggtggcgtcacgtatccggagctgattaccacggatgtctatgatcccaagagccctctcaacacggggaatcagtag

SEQ ID NO: 65 - protein, 391 aa, Unknown
  Trichoderma reesei Sequence
MASGNPYTLKWGIMATGGIAETFCKDLLCNPAIRGADDVRHEIVAVASSSSSKRAEEFLQRIDGAFDAKTYGSYPELVADPNVDIVYVATPHSHHFQNTMLALEAGKNVLCEKAFTVTAAQARKLVETAKAKKLFLMEAVWTRYFPLSIKIRELIAAGEIGTVFRTIADLSINANSEQGQALKFADSHRMVNPDLAGGATLDLGVYPLTWVFQTLYHLQPEEDKEAPTVVASSNKYTTGADENTAIICSFPRHNSIGIASTTMRADTDPEKDTIPAVRIQGSKGEIQVFFPTYRPLKYKVVKTNGEAQTVDCPIPGDPARKGSGHGMFWEADECARCLRDGKLESATLPWKESIVIMETMEEALRQGGVTYPELITTDVYDPKSPLNTGNQ

SEQ ID NO: 66 - DNA, 870 bp, Caulobacter crescentus
atgaccgctcaagtcacttgcgtatgggatctgaaggccacgttgggcgaaggcccgatctggcatggcgacaccctgtggttcgtcgacatcaagcagcgtaaaatccacaactaccaccccgccaccggcgagcgcttcagcttcgacgcgccggatcaggtgaccttcctcgcgccgatcgtcggcgcgaccggctttgtcgtcggtctgaagaccgggattcaccgcttccacccggccacgggcttcagcctgctgctcgaggtcgaggacgcggcgctgaacaaccgccccaacgacgccacggtcgacgcgcaaggccgtctgtggttcggcaccatgcacgacggggaagagaacaatagcggctcgctctatcggatggacctcaccggcgtcgcccggatggaccgcgacatctgcatcaccaacggcccgtgcgtctcgcccgacggcaagaccttctaccacaccgacaccctggaaaagacgatctacgccttcgacctggccgaggacggcctgctgtcgaacaagcgcgtcttcgtgcagttcgccctgggcgacgatgtctatccggacggttcggtcgtcgattccgaaggctatctgtggaccgccctgtggggcggtttcggcgcggtccgcttctcgccgcaaggcgacgccgtgacgcgcatcgaactgcccgcccccaacgtcaccaagccctgcttcggcgggcctgacctgaagaccctctatttcaccaccgcccgcaagggcctgagcgacgagaccctggcccagtacccgctggccggcggtgtgttcgccgttccggtcgatgtggccggccaaccccagcatgaggtccgccttgtctaa

SEQ ID NO: 67 - protein, 289 aa, Caulobacter crescentus
MTAQVTCVWDLKATLGEGPIWHGDTLWFVDIKQRKIHNYHPATGERFSFDAPDQVTFLAPIVGATGFVVGLKTGIHRFHPATGFSLLLEVEDAALNNRPNDATVDAQGRLWFGTMHDGEENNSGSLYRMDLTGVARMDRDICITNGPCVSPDGKTFYHTDTLEKTIYAFDLAEDGLLSNKRVFVQFALGDDVYPDGSVVDSEGYLWTALWGGFGAVRFSPQGDAVTRIELPAPNVTKPCFGGPDLKTLYFTTARKGLSDETLAQYPLAGGVFAVPVDVAGQPQHEVRLV

SEQ ID NO: 68 - DNA, 1776 bp, Caulobacter crescentus
ttgtctaaccgcacgccccgccggttccggtcccgcgattggttcgataaccccgaccatatcgacatgaccgcgctctatctggagcgcttcatgaactacgggatcacgccggaggagctgcgcagcggcaagccgatcatcggcatcgcccagaccggcagcgacatctcgccctgcaaccgcatccacctggacctggtccagcgggtgcgggacgggatccgcgacgccgggggcatccccatggagttcccggtccatccgatcttcgagaactgccgtcgcccgacggcggcgctggaccggaacctctcgtacctgggtctcgtcgagaccctgcacggctatccgatcgacgccgtggttctgaccaccggctgcgacaagaccaccccggccgggatcatggccgccaccacggtcaatatcccggccatcgtgctgtcgggcggcccgatgctggacggctggcacgagaacgagctcgtgggctcgggcaccgtgatctggcgctcgcgccgcaagctggcggccggcgagatcaccgaggaagagttcatcgaccgcgccgccagctcggcgccgtcggcgggccactgcaacaccatgggcacggcctcgaccatgaacgccgtggccgaggcgctgggcctgtcgctgaccggctgcgcggccatccccgccccctaccgcgagcgcggccagatggcctacaagaccggccagcgcatcgtcgatctggcctatgacgacgtcaaaccgctcgacatcctgaccaagcaagccttcgagaacgccatcgccctggtggcggcggccggcggctcgaccaacgcccagccgcacatcgtggccatggcccgtcacgccggcgtcgagatcaccgccgacgactggcgcgcggcctatgacatcccgctgatcgtcaacatgcagccggccggcaagtatctgggcgagcgcttccaccgagccggcggcgcgccggcggtgctgtgggagctgttgcagcaaggccgcctgcacggcgacgtgctgaccgtcaccggcaagacgatgagcgagaacctgcaaggccgcgaaaccagcgaccgcgaggtgatcttcccgtaccacgagccgctggccgagaaggccgggttcctggttctcaagggcaacctcttcgacttcgcgatcatgaagtccagcgtgatcggcgaggagttccgcaagcgctacctgtcgcagcccggccaggaaggcgtgttcgaagcccgcgccatcgtgttcgacggctcggacgactatcacaagcggatcaacgatccggccctggagatcgacgagcgctgcatcctggtgatccgcggcgcgggtccgatcggctggcccggctcggccgaggtcgtcaacatgcagccgccggatcaccttctgaagaaggggatcatgagcctgcccaccctgggcgatggccgtcagtcgggcaccgccgacagcccctcgatcctgaacgcctcgcccgaaagcgcgatcggcggcggcctgtcgtggctgcgcaccggcgacaccatccgcatcgacctcaacaccggccgctgcgacgccctggtcgacgaggcgacgatcgccgcgcgcaagcaggacggcatcccggcggttcccgccaccatgacgccctggcaggaaatctaccgcgcccacgccagtcagctcgacaccggcggcgtgctggagttcgcggtcaagtaccaggacctggcggccaagctgccccgccacaaccactga

SEQ ID NO: 69 - protein, 591 aa, Caulobacter crescentus
MSNRTPRRFRSRDWFDNPDHIDMTALYLERFMNYGITPEELRSGKPIIGIAQTGSDISPCNRIHLDLVQRVRDGIRDAGGIPMEFPVHPIFENCRRPTAALDRNLSYLGLVETLHGYPIDAVVLTTGCDKTTPAGIMAATTVNIPAIVLSGGPMLDGWHENELVGSGTVIWRSRRKLAAGEITEEEFIDRAASSAPSAGHCNTMGTASTMNAVAEALGLSLTGCAAIPAPYRERGQMAYKTGQRIVDLAYDDVKPLDILTKQAFENAIALVAAAGGSTNAQPHIVAMARHAGVEITADDWRAAYDIPLIVNMQPAGKYLGERFHRAGGAPAVLWELLQQGRLHGDVLTVTGKTMSENLQGRETSDREVIFPYHEPLAEKAGFLVLKGNLFDFAIMKSSVIGEEFRKRYLSQPGQEGVFEARAIVFDGSDDYHKRINDPALEIDERCILVIRGAGPIGWPGSAEVVNMQPPDHLLKKGIMSLPTLGDGRQSGTADSPSILNASPESAIGGGLSWLRTGDTIRIDLNTGRCDALVDEATIAARKQDGIPAVPATMTPWQEIYRAHASQLDTGGVLEFAVKYQDLAAKLPRHNH

SEQ ID NO: 70 - DNA, 1968 bp, Escherichia coli
atgtctgttcgcaatatttttgctgacgagagccacgatatttacaccgtcagaacgcacgccgatggcccggacggcgaactcccattaaccgcagagatgcttatcaaccgcccgagcggggatctgttcggtatgaccatgaatgccggaatgggttggtctccggacgagctggatcgggacggtattttactgctcagtacactcggtggcttacgcggcgcagacggtaaacccgtggcgctggcgttgcaccaggggcattacgaactggacatccagatgaaagcggcggccgaggttattaaagccaaccatgccctgccctatgccgtgtacgtctccgatccttgtgacgggcgtactcagggtacaacggggatgtttgattcgctaccataccgaaatgacgcatcgatggtaatgcgccgccttattcgctctctgcccgacgcgaaagcagttattggtgtggcgagttgcgataaggggcttccggccaccatgatggcactcgccgcgcagcacaacatcgcaaccgtgctggtccccggcggcgcgacgctgcccgcaaaggatggagaagacaacggcaaggtgcaaaccattggcgcacgcttcgccaatggcgaattatctctacaggacgcacgccgtgcgggctgtaaagcctgtgcctcttccggcggcggctgtcaatttttgggcactgccgggacatctcaggtggtggccgaaggattgggactggcaatcccacattcagccctggccccttccggtgagcctgtgtggcgggagatcgccagagcttccgcgcgagctgcgctgaacctgagtcaaaaaggcatcaccacccgggaaattctcaccgataaagcgatagagaatgcgatgacggtccatgccgcgttcggtggttcaacaaacctgctgttacacatcccggcaattgctcaccaggcaggttgccatatcccgaccgttgatgactggatccgcatcaacaagcgcgtgccccgactggtgagcgtactgcctaatggcccggtttatcatccaacggtcaatgcctttatggcaggtggtgtgccggaagtcatgttgcatctgcgcagcctcggattgttgcatgaagacgttatgacggttaccggcagcacgctgaaagaaaacctcgactggtgggagcactccgaacggcgtcagcggttcaagcaactcctgctcgatcaggaacaaatcaacgctgacgaagtgatcatgtctccgcagcaagcaaaagcgcgcggattaacctcaactatcaccttcccggtgggcaatattgcgccagaaggttcggtgatcaaatccaccgccattgacccctcgatgattgatgagcaaggtatctattaccataaaggtgtggcgaaggtttatctgtccgagaaaagtgcgatttacgatatcaaacatgacaagatcaaggcgggcgatattctggtcattattggcgttggaccttcaggtacagggatggaagaaacctaccaggttaccagtgccctgaagcatctgtcatacggtaagcatgtttcgttaatcaccgatgcacgtttctcgggcgtttctactggcgcgtgcatcggccatgtggggccagaagcgctggccggaggccccatcggtaaattacgcaccggggatttaattgaaattaaaattgattgtcgcgagcttcacggcgaagtcaatttcctcggaacccgtagcgatgaacaattaccttcacaggaggaggcaactgcaatattaaatgccagacccagccatcaggatttacttcccgatcctgaattgccagatgatacccggctatgggcaatgcttcaggccgtgagtggtgggacatggaccggttgtatttatgatgtaaacaaaattggcgcggctttgcgcgattttatgaataaaaactga

SEQ ID NO: 71 - DNA, 1968 bp, Artificial Sequence; identical to SEQ ID NO: 70
  Codon Optimized E. coli Sequence

SEQ ID NO: 72 - protein, 655 aa, Escherichia coli [sequence omitted]

SEQ ID NO: 73 - DNA, 1968 bp, Escherichia coli
atgaccattgagaaaattttcaccccgcaggacgacgcgttttatgcggtgatcacccacgcggcggggccgcagggcgctctgccgctgaccccgcagatgctgatggaatctcccagcggcaacctgttcggcatgacgcagaacgccgggatgggctgggacgccaacaagctcaccggcaaagaggtgctgattatcggcactcagggcggcatccgcgccggagacggacgcccaatcgcgctgggctaccacaccgggcattgggagatcggcatgcagatgcaggcggcggcgaaggagatcacccgcaatggcgggatcccgttcgcggccttcgtcagcgatccgtgcgacgggcgctcgcagggcacgcacggtatgttcgattccctgccgtaccgcaacgacgcggcgatcgtgtttcgccgcctgatccgctccctgccgacgcggcgggcggtgatcggcgtagcgacctgcgataaagggctgcccgccaccatgattgcgctggccgcgatgcacgacctgccgactattctggtgccgggcggggcgacgctgccgccgaccgtcggggaagacgcgggcaaggtgcagaccatcggcgcgcgtttcgccaaccacgaactctccctgcaggaggccgccgaactgggctgtcgcgcctgcgcctcgccgggcggcgggtgtcagttcctcggcacggcgggcacctcgcaggtggtcgcggaggcgctgggtctggcgctgccgcactccgcgctggcgccgtccgggcaggcggtgtggctggagatcgcccgccagtcggcgcgcgcggtcagcgagctggatagccgcggcatcaccacgcgggatatcctctccgataaagccatcgaaaacgcgatggtgatccacgcggcgttcggcggctccaccaatttactgctgcacattccggccatcgcccacgcggcgggctgcacgatcccggacgttgagcactggacgcgcatcaaccgtaaagtgccgcgtctggtgagcgtgctgcccaacggcccggactatcacccgaccgtgcgcgccttcctcgcgggcggcgtgccggaggtgatgctccacctgcgcgacctcggcctgctgcatctggacgccatgaccgtgaccggccagacggtgggcgagaaccttgaatggtggcaggcgtccgagcgccgggcgcgcttccgccagtgcctgcgcgagcaggacggcgtagagccggatgacgtgatcctgccgccggagaaggcaaaagcgaaagggctgacctcgacggtctgcttcccgacgggcaacatcgctccggaaggttcggtgatcaaggccacggcgatcgacccgtcggtggtgggcgaagatggcgtataccaccacaccggccgggtgcgggtgtttgtctcggaagcgcaggcgatcaaggcgatcaagcgggaagagattgtgcagggcgatatcatggtggtgatcggcggcgggccgtccggcaccggcatggaagagacctaccagctcacctccgcgctaaagcatatctcgtggggcaagacggtgtcgctcatcaccgatgcgcgcttctcgggcgtgtcgacgggcgcctgcttcggccacgtgtcgccggaggcgctggcgggcgggccgattggcaagctgcgcgataacgacatcatcgagattgccgtggatcgtctgacgttaactggcagcgtgaacttcatcggcaccgcggacaacccgctgacgccggaagagggcgcgcgcgagctggcgcggcggcagacgcacccggacctgcacgcccacgactttttgccggacgacacccggctgtgggcggcactgcagtcggtgagcggcggcacctggaaaggctgtatttatgacaccgataaaattatcgaggtaattaacgccggtaaaaaagcgctcggaatttaa

SEQ ID NO: 74 - DNA, 1968 bp, Artificial Sequence; identical to SEQ ID NO: 73
  Codon Optimized E. coli Sequence

SEQ ID NO: 75 - protein, 655 aa, Escherichia coli
MTIEKIFTPQDDAFYAVITHAAGPQGALPLTPQMLMESPSGNLFGMTQNAGMGWDANKLTGKEVLIIGTQGGIRAGDGRPIALGYHTGHWEIGMQMQAAAKEITRNGGIPFAAFVSDPCDGRSQGTHGMFDSLPYRNDAAIVFRRLIRSLPTRRAVIGVATCDKGLPATMIALAAMHDLPTILVPGGATLPPTVGEDAGKVQTIGARFANHELSLQEAAELGCRACASPGGGCQFLGTAGTSQVVAEALGLALPHSALAPSGQAVWLEIARQSARAVSELDSRGITTRDILSDKAIENAMVIHAAFGGSTNLLLHIPAIAHAAGCTIPDVEHWTRINRKVPRLVSVLPNGPDYHPTVRAFLAGGVPEVMLHLRDLGLLHLDAMTVTGQTVGENLEWWQASERRARFRQCLREQDGVEPDDVILPPEKAKAKGLTSTVCFPTGNIAPEGSVIKATAIDPSVVGEDGVYHHTGRVRVFVSEAQAIKAIKREEIVQGDIMVVIGGGPSGTGMEETYQLTSALKHISWGKTVSLITDARFSGVSTGACFGHVSPEALAGGPIGKLRDNDIIEIAVDRLTLTGSVNFIGTADNPLTPEEGARELARRQTHPDLHAHDFLPDDTRLWAALQSVSGGTWKGCIYDTDKIIEVINAGKKALGI

SEQ ID NO: 76 - DNA, 906 bp, Escherichia coli
atgaaaaaattcagcggcattattccaccggtatccagcacgtttcatcgtgacggaacccttgataaaaaggcaatgcgcgaagttgccgacttcctgattaataaaggggtcgacgggctgttttatctgggtaccggtggtgaatttagccaaatgaatacagcccagcgcatggcactcgccgaagaagctgtaaccattgtcgacgggcgagtgccggtattgattggcgtcggttccccttccactgacgaagcggtcaaactggcgcagcatgcgcaagcctacggcgctgatggtatcgtcgccatcaacccctactactggaaagtcgcaccacgaaatcttgacgactattaccagcagatcgcccgtagcgtcaccctaccggtgatcctgtacaactttccggatctgacgggtcaggacttaaccccggaaaccgtgacgcgtctggctctgcaaaacgagaatatcgttggcatcaaagacaccatcgacagcgttggtcacttgcgtacgatgatcaacacagttaagtcggtacgcccgtcgttttcggtattctgcggttacgatgatcatttgctgaatacgatgctgctgggcggcgacggtgcgataaccgccagcgctaactttgctccggaactctccgtcggcatctaccgcgcctggcgtgaaggcgatctggcgaccgctgcgacgctgaataaaaaactactacaactgcccgctatttacgccctcgaaacaccgtttgtctcactgatcaaatacagcatgcagtgtgtcgggctgcctgtagagacatattgcttaccaccgattcttgaagcatctgaagaagcaaaagataaagtccacgtgctgcttaccgcgcagggcattttaccagtctga

SEQ ID NO: 77 - DNA, 906 bp, Artificial Sequence; identical to SEQ ID NO: 76
  Codon Optimized E. coli Sequence

SEQ ID NO: 78 - protein, 301 aa, Escherichia coli
MKKFSGIIPPVSSTFHRDGTLDKKAMREVADFLINKGVDGLFYLGTGGEFSQMNTAQRMALAEEAVTIVDGRVPVLIGVGSPSTDEAVKLAQHAQAYGADGIVAINPYYWKVAPRNLDDYYQQIARSVTLPVILYNFPDLTGQDLTPETVTRLALQNENIVGIKDTIDSVGHLRTMINTVKSVRPSFSVFCGYDDHLLNTMLLGGDGAITASANFAPELSVGIYRAWREGDLATAATLNKKLLQLPAIYALETPFVSLIKYSMQCVGLPVETYCLPPILEASEEAKDKVHVLLTAQGILPV

SEQ ID NO: 79 - DNA, 909 bp, Escherichia coli
atgccgcagtccgcgttgttcacgggaatcattccccctgtctccaccatttttaccgccgacggccagctcgataagccgggcaccgccgcgctgatcgacgatctgatcaaagcaggcgttgacggcctgttcttcctgggcagcggtggcgagttctcccagctcggcgccgaagagcgtaaagccattgcccgctttgctatcgatcatgtcgatcgtcgcgtgccggtgctgatcggcaccggcggcaccaacgcccgggaaaccatcgaactcagccagcacgcgcagcaggcgggcgcggacggcatcgtggtgatcaacccctactactggaaagtgtcggaagcgaacctgatccgctatttcgagcaggtggccgacagcgtcacgctgccggtgatgctctataacttcccggcgctgaccgggcaggatctgactccggcgctggtgaaaaccctcgccgactcgcgcagcaatattatcggcatcaaagacaccatcgactccgtcgcccacctgcgcagcatgatccataccgtcaaaggtgcccatccgcacttcaccgtgctctgcggctacgacgatcatctgttcaataccctgctgctcggcggcgacggggcgatatcggcgagcggcaactttgccccgcaggtgtcggtgaatcttctgaaagcctggcgcgacggggacgtggcgaaagcggccgggtatcatcagaccttgctgcaaattccgcagatgtatcagctggatacgccgtttgtgaacgtgattaaagaggcgatcgtgctctgcggtcgtcctgtctccacgcacgtgctgccgcccgcctcgccgctggacgagccgcgcaaggcgcagctgaaaaccctgctgcaacagctcaagctttgctga

SEQ ID NO: 80 - DNA, 909 bp, Artificial Sequence; identical to SEQ ID NO: 79
  Codon Optimized E. coli Sequence

SEQ ID NO: 81 - protein, 302 aa, Escherichia coli
MPQSALFTGIIPPVSTIFTADGQLDKPGTAALIDDLIKAGVDGLFFLGSGGEFSQLGAEERKAIARFAIDHVDRRVPVLIGTGGTNARETIELSQHAQQAGADGIVVINPYYWKVSEANLIRYFEQVADSVTLPVMLYNFPALTGQDLTPALVKTLADSRSNIIGIKDTIDSVAHLRSMIHTVKGAHPHFTVLCGYDDHLFNTLLLGGDGAISASGNFAPQVSVNLLKAWRDGDVAKAAGYHQTLLQIPQMYQLDTPFVNVIKEAIVLCGRPVSTHVLPPASPLDEPRKAQLKTLLQQLKLC

SEQ ID NO: 82 - DNA, 957 bp, Unknown
  Scheffersomyces stipitis Sequence
atgccttctattaagttgaactctggttacgacatgccagccgtcggtttcggctgttggaaagtcgacgtcgacacctgttctgaacagatctaccgtgctatcaagaccggttacagattgttcgacggtgccgaagattacgccaacgaaaagttagttggtgccggtgtcaagaaggccattgacgaaggtatcgtcaagcgtgaagatttgttccttacctccaagttgtggaacaactaccaccacccagacaacgtcgaaaaggccttgaacagaaccctttctgacttgcaagttgactacgttgacttgttcttgatccacttcccagtcaccttcaagttcgttccattagaagaaaagtacccaccaggattctactgtggtaagggtgacaacttcgactacgaagatgttccaattttagagacttggaaggctcttgaaaagttggtcaaggccggtaagatcagatctatcggtgtttctaacttcccaggtgctttgctcttggacttgttgagaggtgctaccatcaagccatctgtcttgcaagttgaacaccacccatacttgcaacaaccaagattgatcgaattcgctcaatcccgtggtattgctgtcaccgcttactcttcgttcggtcctcaatctttcgttgaattgaaccaaggtagagctttgaacacttctccattgttcgagaacgaaactatcaaggctatcgctgctaagcacggtaagtctccagctcaagtcttgttgagatggtcatcccaaagaggcattgccatcattccaaagtccaacactgtcccaagattgttggaaaacaaggacgtcaacagcttcgacttggacgaacaagatttcgctgacattgccaagttggacatcaacttgagattcaacgacccatgggactgggacaagattcctatcttcgtctaa

SEQ ID NO: 83 - DNA, 957 bp, Artificial Sequence
  Codon Optimized Scheffersomyces stipitis Sequence
atgccatctatcaagttaaattccggttacgacatgcctgctgttggtttcggttgctggaaggttgatgtcgatacttgttccgagcaaatttaccgtgctatcaagactggttacagattgttcgatggtgctgaagactacgccaacgaaaagttagtcggtgctggtgttaaaaaggctatcgacgaaggtattgttaaaagagaagacttgttcttgacttctaagttgtggaacaactaccaccatcctgataacgtcgaaaaagctttgaaccgtaccttgtccgatttgcaagtcgattacgttgatttgttcttgattcatttcccagttaccttcaagttcgttccattggaagagaagtatccaccaggtttctactgtggtaagggtgataacttcgattacgaagatgtcccaatcttagaaacctggaaggctttagaaaagttggttaaggctggtaagatcagatccatcggtgtttctaacttcccaggtgccttattgttagacttattgagaggtgctaccattaagccttccgttttgcaagttgaacatcatccttacttgcaacaaccaagattgatcgaattcgctcaatctagaggtatcgctgttactgcctactcttccttcggtccacaatctttcgttgagttgaaccaaggtagagctttgaacacctctccattgttcgaaaacgaaactattaaggccattgctgctaagcatggtaagtctccagcccaagttttgttgagatggtcttctcaaagaggtatcgctattatcccaaagtctaatactgtcccaagattgttggaaaacaaggacgttaactcctttgatttggatgaacaagactttgctgacatcgctaaattggacatcaacttgagattcaacgacccatgggactgggacaagattccaatttttgtttaa

SEQ ID NO: 84 - protein, 318 aa, Unknown
  Scheffersomyces stipitis Sequence
MPSIKLNSGYDMPAVGFGCWKVDVDTCSEQIYRAIKTGYRLFDGAEDYANEKLVGAGVKKAIDEGIVKREDLFLTSKLWNNYHHPDNVEKALNRTLSDLQVDYVDLFLIHFPVTFKFVPLEEKYPPGFYCGKGDNFDYEDVPILETWKALEKLVKAGKIRSIGVSNFPGALLLDLLRGATIKPSVLQVEHHPYLQQPRLIEFAQSRGIAVTAYSSFGPQSFVELNQGRALNTSPLFENETIKAIAAKHGKSPAQVLLRWSSQRGIAIIPKSNTVPRLLENKDVNSFDLDEQDFADIAKLDINLRFNDPWDWDKIPIFV

SEQ ID NO: 85 - DNA, 984 bp, Saccharomyces cerevisiae; identical to SEQ ID NO: 16

SEQ ID NO: 86 - DNA, 984 bp, Artificial Sequence; identical to SEQ ID NO: 16
  Codon Optimized Saccharomyces cerevisiae Sequence

SEQ ID NO: 87 - protein, 327 aa, Saccharomyces cerevisiae; identical to SEQ ID NO: 17

SEQ ID NO: 88 - DNA, 1092 bp, Unknown
  Scheffersomyces stipitis Sequence
atgactgctaacccttccttggtgttgaacaagatcgacgacatttcgttcgaaacttacgatgccccagaaatctctgaacctaccgatgtcctcgtccaggtcaagaaaaccggtatctgtggttccgacatccacttctacgcccatggtagaatcggtaacttcgttttgaccaagccaatggtcttgggtcacgaatccgccggtactgttgtccaggttggtaagggtgtcacctctcttaaggttggtgacaacgtcgctatcgaaccaggtattccatccagattctccgacgaatacaagagcggtcactacaacttgtgtcctcacatggccttcgccgctactcctaactccaaggaaggcgaaccaaacccaccaggtaccttatgtaagtacttcaagtcgccagaagacttcttggtcaagttgccagaccacgtcagcttggaactcggtgctcttgttgagccattgtctgttggtgtccacgcctctaagttgggttccgttgctttcggcgactacgttgccgtctttggtgctggtcctgttggtcttttggctgctgctgtcgccaagaccttcggtgctaagggtgtcatcgtcgttgacattttcgacaacaagttgaagatggccaaggacattggtgctgctactcacaccttcaactccaagaccggtggttctgaagaattgatcaaggctttcggtggtaacgtgccaaacgtcgttttggaatgtactggtgctgaaccttgtatcaagttgggtgttgacgccattgccccaggtggtcgtttcgttcaagtcggtaacgctgctggtccagtcagcttcccaatcaccgttttcgccatgaaggaattgactttgttcggttctttcagatacggattcaacgactacaagactgctgttggaatctttgacactaactaccaaaacggtagagaaaatgctccaattgactttgaacaattgatcacccacagatacaagttcaaggacgctattgaagcctacgacttggtcagagccggtaagggtgctgtcaagtgtctcattgacggccctgagtaa

SEQ ID NO: 89 - DNA, 1092 bp, Artificial Sequence
  Codon Optimized Scheffersomyces stipitis
atgactgctaacccttccttggtgttgaacaagatcgacgacatttcgttcgaaacttacgatgccccagaaatctctgaacctaccgatgtcctcgtccaggtcaagaaaaccggtatctgtggttccgacatccacttctacgcccatggtagaatcggtaacttcgttttgaccaagccaatggtcttgggtcacgaatccgccggtactgttgtccaggttggtaagggtgtcacctctcttaaggttggtgacaacgtcgctatcgaaccaggtattccatccagattctccgacgaatacaagagcggtcactacaacttgtgtcctcacatggccttcgccgctactcctaactccaaggaaggcgaaccaaacccaccaggtaccttatgtaagtacttcaagtcgccagaagatttcttggtcaagttgccagaccacgtcagcttggaactcggtgctcttgttgagccattgtctgttggtgtccacgcctctaagttgggttccgttgctttcggcgactacgttgccgtctttggagcaggtcctgttggtcttttggctgctgctgtcgccaagaccttcggtgctaagggtgtcatcgtcgttgacattttcgacaacaagttgaagatggccaaggacattggagctgctactcacaccttcaactccaagaccggtggttctgaagaattgatcaaggctttcggtggtaacgtgccaaacgtcgttttggaatgtacaggtgcagaaccttgtatcaagttgggtgttgacgccattgccccaggtggtcgtttcgttcaagtcggtaacgctgctggtccagtcagcttcccaatcaccgttttcgccatgaaggaattgactttgttcggttctttcagatacggattcaacgactacaagactgctgttggaatctttgacactaactaccaaaacggtagagaaaatgctccaattgactttgaacaattgatcacccacagatacaagttcaaggacgctattgaagcctacgacttggtcagagccggtaagggtgctgtcaagtgtctcattgacggccctgagtaa

SEQ ID NO: 90 - protein, 363 aa, Unknown
  Scheffersomyces stipitis Sequence
MTANPSLVLNKIDDISFETYDAPEISEPTDVLVQVKKTGICGSDIHFYAHGRIGNFVLTKPMVLGHESAGTVVQVGKGVTSLKVGDNVAIEPGIPSRFSDEYKSGHYNLCPHMAFAATPNSKEGEPNPPGTLCKYFKSPEDFLVKLPDHVSLELGALVEPLSVGVHASKLGSVAFGDYVAVFGAGPVGLLAAAVAKTFGAKGVIVVDIFDNKLKMAKDIGAATHTFNSKTGGSEELIKAFGGNVPNVVLECTGAEPCIKLGVDAIAPGGRFVQVGNAAGPVSFPITVFAMKELTLFGSFRYGFNDYKTAVGIFDTNYQNGRENAPIDFEQLITHRYKFKDAIEAYDLVRAGKGAVKCLIDGPE

SEQ ID NO: 91 - DNA, 1092 bp, Unknown
  Trichoderma reesei Sequence
atggcgactcaaacgatcaacaaggatgcgatcagcaacctctccttcgtcctcaacaagcccggcgacgtgacctttgaggagcggccgaagccgaccatcacggaccccaacgacgtcctcgtcgccgtcaactacacgggcatctgcggctccgacgtgcactactgggtgcacggcgccatcgggcacttcgtcgtcaaggacccgatggtgctgggccacgagtcggccggcaccgtcgtcgaggtcggcccggccgtcaagagcctcaagcccggcgaccgcgtcgccctcgagcccggctacccgtgccggcggtgctccttctgccgcgccggcaaatacaacctgtgcccggacatggtcttcgccgccacgccgccgtaccacggcaccctgacgggcctgtgggcggcgcccgccgacttctgctacaagctgccggacggcgtgtcgctgcaggagggcgcgctgatcgagccgctggccgtggccgtccacattgtcaagcaggcccgcgtccagccgggccagtccgtcgtcgtcatgggcgccggccccgtcggcctgctgtgcgccgccgtggccaaggcgtacggcgcctccaccattgtcagcgtcgacatcgtgcagtccaagctcgactttgcgcgcggcttctgctcgacgcacacgtacgtctcgcagcgcatctcggctgaggacaacgcaaaggccatcaaggagctggcgggcctgcccggcggcgccgacgtcgtgattgacgccagcggcgcggagccgtcgatccagacgagcattcacgtcgtccgcatgggcggcacgtacgtccagggcggcatgggcaagagcgacatcacgttccccatcatggccatgtgcctcaaggaggtgacggtccggggctcgttccgctacggcgccggcgactacgagctggcggtcgagctggtccggacggggcgggtggacgtcaagaagctgattacgggcaccgtcagcttcaagcaggcggaggaggcgttccaaaaggtcaagtctggggaggccatcaagattctgattgccgggcccaacgagaaggtgtaa

SEQ ID NO: 92 - protein, 363 aa, Unknown
  Trichoderma reesei Sequence
MATQTINKDAISNLSFVLNKPGDVTFEERPKPTITDPNDVLVAVNYTGICGSDVHYWVHGAIGHFVVKDPMVLGHESAGTVVEVGPAVKSLKPGDRVALEPGYPCRRCSFCRAGKYNLCPDMVFAATPPYHGTLTGLWAAPADFCYKLPDGVSLQEGALIEPLAVAVHIVKQARVQPGQSVVVMGAGPVGLLCAAVAKAYGASTIVSVDIVQSKLDFARGFCSTHTYVSQRISAEDNAKAIKELAGLPGGADVVIDASGAEPSIQTSIHVVRMGGTYVQGGMGKSDITFPIMAMCLKEVTVRGSFRYGAGDYELAVELVRTGRVDVKKLITGTVSFKQAEEAFQKVKSGEAIKILIAGPNEKV

SEQ ID NO: 93 - DNA, 1314 bp, Unknown
  Pyromyces sp. Sequence
atggctaaggaatatttcccacaaattcaaaagattaagttcgaaggtaaggattctaagaatccattagccttccactactacgatgctgaaaaggaagtcatgggtaagaaaatgaaggattggttacgtttcgccatggcctggtggcacactctttgcgccgaaggtgctgaccaattcggtggaggtacaaagtctttcccatggaacgaaggtactgatgctattgaaattgccaagcaaaaggttgatgctggtttcgaaatcatgcaaaagcttggtattccatactactgtttccacgatgttgatcttgtttccgaaggtaactctattgaagaatacgaatccaaccttaaggctgtcgttgcttacctcaaggaaaagcaaaaggaaaccggtattaagcttctctggagtactgctaacgtcttcggtcacaagcgttacatgaacggtgcctccactaacccagactttgatgttgtcgcccgtgctattgttcaaattaagaacgccatagacgccggtattgaacttggtgctgaaaactacgtcttctggggtggtcgtgaaggttacatgagtctccttaacactgaccaaaagcgtgaaaaggaacacatggccactatgcttaccatggctcgtgactacgctcgttccaagggattcaagggtactttcctcattgaaccaaagccaatggaaccaaccaagcaccaatacgatgttgacactgaaaccgctattggtttccttaaggcccacaacttagacaaggacttcaaggtcaacattgaagttaaccacgctactcttgctggtcacactttcgaacacgaacttgcctgtgctgttgatgctggtatgctcggttccattgatgctaaccgtggtgactaccaaaacggttgggatactgatcaattcccaattgatcaatacgaactcgtccaagcttggatggaaatcatccgtggtggtggtttcgttactggtggtaccaacttcgatgccaagactcgtcgtaactctactgacctcgaagacatcatcattgcccacgtttctggtatggatgctatggctcgtgctcttgaaaacgctgccaagctcctccaagaatctccatacaccaagatgaagaaggaacgttacgcttccttcgacagtggtattggtaaggactttgaagatggtaagctcaccctcgaacaagtttacgaatacggtaagaagaacggtgaaccaaagcaaacttctggtaagcaagaactctacgaagctattgttgccatgtaccaataa

SEQ ID NO: 94 - DNA, 1314 bp, Unknown
  Codon Optimized Pyromyces sp. Sequence
atggccaaggaatacttcccacaaatccaaaagattaaattcgaaggtaaagattccaagaacccattggcttttcactactacgatgctgagaaggaagttatgggtaagaagatgaaggattggttgagattcgctatggcttggtggcacactttgtgcgctgaaggtgctgaccaattcggtggtggtactaagtctttcccatggaacgaaggtactgatgctattgaaatcgctaagcaaaaagtcgatgctggttttgagattatgcaaaaattgggtatcccatactactgtttccacgacgtcgacttggtttctgaaggtaattctatcgaagaatacgaatctaatttgaaggctgttgtcgcttacttaaaagaaaagcaaaaggagactggtattaagttgttgtggtccaccgctaacgtctttggtcataaaagatacatgaacggtgcttccaccaacccagacttcgatgtcgtcgccagagctatcgttcaaattaaaaacgccatcgacgctggtattgaattgggtgctgaaaattacgtcttttggggtggtcgtgaaggttacatgtctttgttgaacactgaccaaaagagagaaaaagaacacatggccactatgttgaccatggccagagattacgccagatctaagggtttcaagggtaccttcttaattgaaccaaaacctatggaaccaactaagcaccaatacgacgttgacactgaaactgctatcggttttttgaaggctcacaacttggataaggattttaaagtcaacattgaagttaaccatgctactttggctggtcacacttttgaacatgaattggcctgtgctgttgatgctggtatgttgggttctatcgatgctaatagaggtgactatcaaaacggttgggacactgatcaattcccaatcgatcaatatgaattagttcaagcttggatggaaattatcagaggtggtggtttcgttactggtggtactaacttcgatgctaagaccagaagaaactctactgatttggaagatattatcattgcccacgtttccggtatggatgccatggccagagctttggaaaacgccgccaagttattgcaagagtccccatacaccaagatgaaaaaggaacgttacgcttctttcgactctggtatcggtaaagacttcgaagatggtaagttgaccttggaacaagtttacgaatacggtaagaagaacggtgaacctaaacaaacctctggtaaacaagaattgtatgaagctattgttgccatgtaccaataa

SEQ ID NO: 95 - protein, 437 aa, Unknown
  Pyromyces sp. Sequence
MAKEYFPQIQKIKFEGKDSKNPLAFHYYDAEKEVMGKKMKDWLRFAMAWWHTLCAEGADQFGGGTKSFPWNEGTDAIEIAKQKVDAGFEIMQKLGIPYYCFHDVDLVSEGNSIEEYESNLKAVVAYLKEKQKETGIKLLWSTANVFGHKRYMNGASTNPDFDVVARAIVQIKNAIDAGIELGAENYVFWGGREGYMSLLNTDQKREKEHMATMLTMARDYARSKGFKGTFLIEPKPMEPTKHQYDVDTETAIGFLKAHNLDKDFKVNIEVNHATLAGHTFEHELACAVDAGMLGSIDANRGDYQNGWDTDQFPIDQYELVQAWMEIIRGGGFVTGGTNFDAKTRRNSTDLEDIIIAHVSGMDAMARALENAAKLLQESPYTKMKKERYASFDSGIGKDFEDGKLTLEQVYEYGKKNGEPKQTSGKQELYEAIVAMYQ

SEQ ID NO: 96 - DNA, 657 bp, Clostridium acetobutylicum
atgaactctaaaataattagatttgaaaatttaaggtcattctttaaagatgggatgacaattatgattggaggttttttaaactgtggcactccaaccaaattaattgattttttagttaatttaaatataaagaatttaacgattataagtaatgatacatgttatcctaatacaggtattggtaagttaatatcaaataatcaagtaaaaaagcttattgcttcatatataggcagcaacccagatactggcaaaaaactttttaataatgaacttgaagtagagctctctccccaaggaactctagtggaaagaatacgtgcaggcggatctggcttaggtggtgtactaactaaaacaggtttaggaactttgattgaaaaaggaaagaaaaaaatatctataaatggaacggaatatttgttagagctacctcttacagccgatgtagcattaattaaaggtagtattgtagatgaggccggaaacaccttctataaaggtactactaaaaactttaatccctatatggcaatggcagctaaaaccgtaatagttgaagctgaaaatttagttagctgtgaaaaactagaaaaggaaaaagcaatgacccccggagttcttataaattatatagtaaaggagcctgcataa

SEQ ID NO: 97 - protein, 218 aa, Clostridium acetobutylicum
MNSKIIRFENLRSFFKDGMTIMIGGFLNCGTPTKLIDFLVNLNIKNLTIISNDTCYPNTGIGKLISNNQVKKLIASYIGSNPDTGKKLFNNELEVELSPQGTLVERIRAGGSGLGGVLTKTGLGTLIEKGKKKISINGTEYLLELPLTADVALIKGSIVDEAGNTFYKGTTKNFNPYMAMAAKTVIVEAENLVSCEKLEKEKAMTPGVLINYIVKEPA

SEQ ID NO: 98 - DNA, 660 bp, Clostridium acetobutylicum
atgattaatgataaaaacctagcgaaagaaataatagccaaaagagttgcaagagaattaaaaaatggtcaacttgtaaacttaggtgtaggtcttcctaccatggttgcagattatataccaaaaaatttcaaaattactttccaatcagaaaacggaatagttggaatgggcgctagtcctaaaataaatgaggcagataaagatgtagtaaatgcaggaggagactatacaacagtacttcctgacggcacatttttcgatagctcagtttcgttttcactaatccgtggtggtcacgtagatgttactgttttaggggctctccaggtagatgaaaagggtaatatagccaattggattgttcctggaaaaatgctctctggtatgggtggagctatggatttagtaaatggagctaagaaagtaataattgcaatgagacatacaaataaaggtcaacctaaaattttaaaaaaatgtacacttcccctcacggcaaagtctcaagcaaatctaattgtaacagaacttggagtaattgaggttattaatgatggtttacttctcactgaaattaataaaaacacaaccattgatgaaataaggtctttaactgctgcagatttactcatatccaatgaacttagacccatggct

SEQ ID NO: 99 - protein, 221 aa, Clostridium acetobutylicum
MINDKNLAKEIIAKRVARELKNGQLVNLGVGLPTMVADYIPKNFKITFQSENGIVGMGASPKINEADKDVVNAGGDYTTVLPDGTFFDSSVSFSLIRGGHVDVTVLGALQVDEKGNIANWIVPGKMLSGMGGAMDLVNGAKKVIIAMRHTNKGQPKILKKCTLPLTAKSQANLIVTELGVIEVINDGLLLTEINKNTTIDEIRSLTAADLLISNELRPMAV

SEQ ID NO: 100 - DNA, 651 bp, Escherichia coli; identical to SEQ ID NO: 41

SEQ ID NO: 101 - protein, 216 aa, Escherichia coli; identical to SEQ ID NO: 43

SEQ ID NO: 102 - DNA, 663 bp, Escherichia coli; identical to SEQ ID NO: 44

SEQ ID NO: 103 - protein, 220 aa, Escherichia coli; identical to SEQ ID NO: 46

SEQ ID NO: 104 - DNA, 1563 bp, Mus musculus
atgcctgggtcacttcctttgaatgcagaggcttgctggccaaaagatgtgggaatcgttgcccttgaaatctactttccttctcaatatgtcgatcaagctgagttggaaaaatacgatggtgtagatgctggaaagtataccatcggcctgggccaggccaggatgggcttctgcacggatcgtgaagacatcaactctctttgcctgactgtggttcagaaactgatggagagacatagcctttcctatgattgcattgggcggctagaagttggaacagagacaatcatcgacaaatcgaaatcagtgaagtctaatttgatgcagctgtttgaggagtctgggaatacagatatagaaggaatagatacaaccaatgcatgctatgggggcacagctgcagtcttcaatgccgtgaactgggtcgaatccagctcttgggatggacgatatgctctggtagttgcaggagacattgctatatatgccacaggaaatgccagacctacaggtggagttggagctgtggccctgctaattgggccaaacgctcctctaatttttgaccgagggctccgtgggacacacatgcagcatgcctatgacttttacaagcctgacatgctctccgagtaccctgtggtcgacggaaagctctccatacagtgctacctcagcgccctggaccgctgctattctgtctaccgcaaaaagatccgtgcccagtggcagaaagagggaaaggataaagattttaccctgaatgattttggcttcatgatctttcactcaccatattgtaaactggtgcagaaatctctagctcggatgttcctgaatgactttcttaatgatcaaaacagagataaaaacagtatttacagtggactggaagcctttggggacgttaaattagaagatacttactttgacagagatgtagaaaaggcatttatgaaggctagttctgagctattcaaccagaaaacaaaggcgtctttgcttgtgtctaatcagaatggaaatatgtacacatcctctgtctatggttccctggcttctgtcctggcacagtactcacctcagcagttggcagggaagagggttggagtgttctcttacggttctggcttggctgccacgctgtactcccttaaagtcacacaagacgccacaccaggatctgcccttgataaaataacagcaagtttatgtgaccttaaatcaaggcttgactcgagaacttgtgtggcaccggatgtctttgctgaaaacatgaagctcagagaggacacacatcacttagccaactatattccccagtgttcaatagactcactctttgaaggaacgtggtatctggtcagagtggatgaaaaacacagaaggacttacgcccggcgccccttcacaaatgaccacagtttggatgaaggaatggggctcgtgcatagtaacacagcaacagagcatattccaagccctgctaagaaagtgccaagactccctgcaacctcggccgaatctgaatcagctgtcatcagtaacggggagcactga

SEQ ID NO: 105 - protein, 520 aa, Mus musculus
MPGSLPLNAEACWPKDVGIVALEIYFPSQYVDQAELEKYDGVDAGKYTIGLGQARMGFCTDREDINSLCLTVVQKLMERHSLSYDCIGRLEVGTETIIDKSKSVKSKLMQLFEESGNTDIEGIDTTNACYGGTAAVFNAVNWVESSSWDGRYALVVAGDIAIYATGNARPTGGVGAVALLIGPNAPLIFDRGLRGTHMQHAYDFYKPDMLSEYPVVDGKLSIQCYLSALDRCYSVYRKKIRAQWQKEGKDKDFTLNDFGFMIFHSPYCKLVQKSLARMFLNDFLNDQNRDKNSIYSGLEAFGDVKLEDTYFDRDVEKAFMKASSELFNQKTKASLLVSNQNGNMYTSSVYGSLASVLAQYSPQQLAGKRVGVFSYGSGLAATLYSLKVTQDATPGSALDKITASLCDLKSRLDSRTCVAPDVFAENMKLREDTHHLANYIPQCSIDSLFEGTWYLVRVDEKHRRTYARRPFTNDHSLDEGMGLVHSNTATEHIPSPAKKVPRLPATSAESESAVISNGEH

SEQ ID NO: 106 - DNA, 770 bp, Saccharomyces cerevisiae
atgaaactctcaactaaactttgttggtgtggtattaaaggaagacttaggccgcaaaagcaacaacaattacacaatacaaacttgcaaatgactgaactaaaaaaacaaaagaccgctgaacaaaaaaccagacctcaaaatgtcggtattaaaggtatccaaatttacatcccaactcaatgtgtcaaccaatctgagctagagaaatttgatggcgtttctcaaggtaaatacacaattggtctgggccaaaccaacatgtcttttgtcaatgacagagaagatatctactcgatgtccctaactgttttgtctaagttgatcaagagttacaacatcgacaccaacaaaattggtagattagaagtcggtactgaaactctgattgacaagtccaagtctgtcaagtctgtcttgatgcaattgtttggtgaaaacactgacgtcgaaggtattgacacgcttaatgcctgttacggtggtaccaacgcgttgttcaactctttgaactggattgaatctaacgcatgggatggtagagacgccattgtagtttgcggtgatattgccatctacgataagggtgccgcaagaccaaccggtggtgccggtactgttgctatgtggatcggtcctgatgctccaattgtatttgactctgtaagagcttcttacatggaacacgcctacgatttttacaagccagatttcaccagcgaatatccttacgtcgatggtcatttttcattaacttgttacgtcaaggc

SEQ ID NO: 107 - protein, 491 aa, Saccharomyces cerevisiae
MKLSTKLCWCGIKGRLRPQKQQQLHNTNLQMTELKKQKTAEQKTRPQNVGIKGIQIYIPTQCVNQSELEKFDGVSQGKYTIGLGQTNMSFVNDREDIYSMSLTVLSKLIKSYNIDTNKIGRLEVGTETLIDKSKSVKSVLMQLFGENTDVEGIDTLNACYGGTNALFNSLNWIESNAWDGRDAIVVCGDIAIYDKGAARPTGGAGTVAMWIGPDAPIVFDSVRASYMEHAYDFYKPDFTSEYPYVDGHFSLTCYVKALDQVYKSYSKKAISKGLVSDPAGSDALNVLKYFDYNVFHVPTCKLVTKSYGRLLYNDFRANPQLFPEVDAELATRDYDESLTDKNIEKTFVNVAKPFHKERVAQSLIVPTNTGNMYTASVYAAFASLLNYVGSDDLQGKRVGLFSYGSGLAASLYSCKIVGDVQHIIKELDITNKLAKRITETPKDYEAAIELRENAHLKKNFKPQGSIEHLQSGVYYLTNIDDKFRRSYDVKK

SEQ ID NO: 108 - DNA, 1167 bp, Lactobacillus crispatus
atgcaagtaggtattgatcaaattggactttttacgccagacaagtacgttgatatggtcgatttggcgaacgcaagaaagcaagatccaaataagtttttagttggcattggtcaaagagagatgagtgttgcggatattacgcaagatgcagtttcaatgggaattaatgcgactttaaagtttattgacaagattgataagaataaagtcggtctattaatttttgggactgaaagcagtattgatcaatcaaagtcagcttctttatttgtaaaaacagccttaaagttgaagccagaagtaagaacttttgaagtaaaggaagcttgctttggtttaacggcagccttaatgatggcacgtgattttgttcgggtacatcctgaacaaaccgcaattgtcatcggtagtgatattgctcgctatggtgttaatactgctggtgaggtaacacaaggagccggtagcgtggcaatgctcatcaaagctgacccaagcattttagccctaaataatggtcattcagcttacagcgaagatattaacgacttctggagaccaaattattctcgcaccgctttagttgacggcaagtattcgactcaagtttacttggatttcttcaagaagacctttactgattataagaagcaaaaaggattgaaaacaagcgactttgatgcgattacttaccatttgccatttactaagatggggatgaaggctaacaatattgctattgaggggcaagatcaagcaacaatgatcaagttggagcgtagttttgcggctgctaaacaattatcaagccgagtaggtaatatctacaccgcttcactttatatgagtttacttagtttgctagagaatggtgaattacccgctggctcattaattggcctgttttcatatggttcaggtgcaatggctgagttttatagtggcaagttggttgaaggatatgaaaaacaaattgatcctacagctgatcaagcaatgcttgatcggcggaagaagctgacagttaagcaatatgaagacgtcttcaatacggctttgttagatcctgaggatggcttagaattaactagcgacgatgaagtaggtacttggtattttgctggtactaaggatcatattcgtcaataccgcgtaaaagaataa

SEQ ID NO: 109 - protein, 388 aa, Lactobacillus crispatus
MQVGIDQIGLFTPDKYVDMVDLANARKQDPNKFLVGIGQREMSVADITQDAVSMGINATLKFIDKIDKNKVGLLIFGTESSIDQSKSASLFVKTALKLKPEVRTFEVKEACFGLTAALMMARDFVRVHPEQTAIVIGSDIARYGVNTAGEVTQGAGSVAMLIKADPSILALNNGHSAYSEDINDFWRPNYSRTALVDGKYSTQVYLDFFKKTFTDYKKQKGLKTSDFDAITYHLPFTKMGMKANNIAIEGQDQATMIKLERSFAAAKQLSSRVGNIYTASLYMSLLSLLENGELPAGSLIGLFSYGSGAMAEFYSGKLVEGYEKQIDPTADQAMLDRRKKLTVKQYEDVFNTALLDPEDGLELTSDDEVGTWYFAGTKDHIRQYRVKE

SEQ ID NO: 110 - DNA, 660 bp, Unknown
  Polaromonas naphthalenivorans Sequence
atgaccctgcatttaccttccagagtcaagctcgtcgatgtcggtccccgcgacggcctgcagaacgaaaaatcgcccgttcccgccgccgtgaaaatcgaactcgtgcatcgcctgcaggacgccggtctcacggaaatcgaggtcaccagttacgtttcgcccaaatgggtgccgcagatggctgacaacgccgaagtcatggccggcatccggcgcaagcccggcgtgcgctattcggtgctgacgcccaacatgcagggtctagaggcggcgatgaagccagcgcccgagttgtggcccgacgagatcgtggtgttcggcgcggccagcgaagccttcagccagcgcaacatcaactgctcgattgccgaaagcatcgagcgtttccggccggtggtggctgcggcccgggccaacaatatttatgttcgcggcgccatttcctgcaccgtcggctgcccctacgagggcgagattgcgccggagcgcgtcgaaatggtggcgcgcctgatgaaggacatcggcgtgcagcacatcggcgtggccgacacgattggcgtcggcacgccgctgaaggtgcagcgcgccctggaagcggcgctgaagcattacgacctcgatggcgtgtcgggccatttccatgacacctacggccag

SEQ ID NO: 111 - protein, 308 aa, Unknown
  Polaromonas naphthalenivorans Sequence
MTLHLPSRVKLVDVGPRDGLQNEKSPVPAAVKIELVHRLQDAGLTEIEVTSYVSPKWVPQMADNAEVMAGIRRKPGVRYSVLTPNMQGLEAAMKPAPELWPDEIVVFGAASEAFSQRNINCSIAESIERFRPVVAAARANNIYVRGAISCTVGCPYEGEIAPERVEMVARLMKDIGVQHIGVADTIGVGTPLKVQRALEAALKHYDLDGVSGHFHDTYGQALANTLASLQMGVWQFDTSVAGLGGCPYAKGATGNVATEDVVYLLHGMGIETGIDLDKLIDAGKFISDFLGRQPNSRAATALLNKRMN

SEQ ID NO: 112 - DNA, 770 bp, Thermoplasma acidophilum
atgacctacagatcaataggatcaactgcttatccaacgatcggcgttgttctcctgggcgggatagcaaatcccgtcacgaggacgccgctgcatacctcggcagggatagcatacagtgattcctgcggatcgataagatccgagaccaggatatacgccgatgaggctacgcacatatatttcaatggtacggaatcgacagatgacaatagatccgtgaggcgtgtgcttgatcgttattcaagcgtcttcgaggaggcgttcggtacgaagactgtttcatattcttcacagaacttcggcatactgagcggcagttccgatgctggagcggcatcgataggcgcagctatattgggcctcaaacccgatctggatccgcacgatgttgaaaatgacctcagggcggtctccgaaagcgcaggcaggagcctcttcggcggcttaacaataacttggagcgatggtttccatgcatatacggaaaagattcttgatcctgaggcattctccgggtattcgatcgttgccttcgcgtttgactatcagagaaatccgtccgatgtcatacaccagaatatagtgagaagcgatctctatccggccaggaagaagcatgccgatgaacatgcgcacatgatcaaggagtacgcaaagacaaacgacataaagggcatatttgatctggcccaggaagatacagaggaataccattccatacttcgtggcgtgggcgtgaacgtgataagggagaacatgcagaagct

SEQ ID NO: 113 - protein, 318 aa, Thermoplasma acidophilum
MTYRSIGSTAYPTIGVVLLGGIANPVTRTPLHTSAGIAYSDSCGSIRSETRIYADEATHIYFNGTESTDDNRSVRRVLDRYSSVFEEAFGTKTVSYSSQNFGILSGSSDAGAASIGAAILGLKPDLDPHDVENDLRAVSESAGRSLFGGLTITWSDGFHAYTEKILDPEAFSGYSIVAFAFDYQRNPSDVIHQNIVRSDLYPARKKHADEHAHMIKEYAKTNDIKGIFDLAQEDTEEYHSILRGVGVNVIRENMQKLISYLKLIRKDYWNAYIVTGGSNVYVAVESENADRLFSIENTFGSKKKMLRIVGGAWHRRPE

SEQ ID NO: 114 - DNA, 957 bp, Thermoplasma acidophilum
atgacctacagatcaataggatcaactgcttatccaacgatcggcgttgttctcctgggcgggatagcaaatcccgtcacgaggacgccgctgcatacctcggcagggatagcatacagtgattcctgcggatcgataagatccgagaccaggatatacgccgatgaggctacgcacatatatttcaatggtacggaatcgacagatgacaatagatccgtgaggcgtgtgcttgatcgttattcaagcgtcttcgaggaggcgttcggtacgaagactgtttcatattcttcacagaacttcggcatactgagcggcagttccgatgctggagcggcatcgataggcgcagctatattgggcctcaaacccgatctggatccgcacgatgttgaaaatgacctcagggcggtctccgaaagcgcaggcaggagcctcttcggcggcttaacaataacttggagcgatggtttccatgcatatacggaaaagattcttgatcctgaggcattctccgggtattcgatcgttgccttcgcgtttgactatcagagaaatccgtccgatgtcatacaccagaatatagtgagaagcgatgagtatccggccaggaagaagcatgccgatgaacatgcgcacatgatcaaggagtacgcaaagacaaacgacataaagggcatatttgatctggcccaggaagatacagaggaataccattccatacttcgtggcgtgggcgtgaacgtgataagggagaacatgcagaagctcatcagttacctgaagctgatcaggaaggattactggaatgcctacatcgtgaccggcggaagcaacgtctacgtggctgtagaaagcgagaatgcagataggctgttttcgatcgaaaataccttcggttcaaaaaagaagatgctcaggatagttggcggtgcctggcatagaagaccagagtga

SEQ ID NO: 115 - protein, 318 aa, Thermoplasma acidophilum
MTYRSIGSTAYPTIGVVLLGGIANPVTRTPLHTSAGIAYSDSCGSIRSETRIYADEATHIYFNGTESTDDNRSVRRVLDRYSSVFEEAFGTKTVSYSSQNFGILSGSSDAGAASIGAAILGLKPDLDPHDVENDLRAVSESAGRSLFGGLTITWSDGFHAYTEKILDPEAFSGYSIVAFAFDYQRNPSDVIHQNIVRSDEYPARKKHADEHAHMIKEYAKTNDIKGIFDLAQEDTEEYHSILRGVGVNVIRENMQKLISYLKLIRKDYWNAYIVTGGSNVYVAVESENADRLFSIENTFGSKKKMLRIVGGAWHRRPE

SEQ ID NO: 116 - DNA, 770 bp, Unknown
  Picrophilus torridus Sequence
atggaaaattacaatgttaagacaagggcgttcccaacaataggcataatactgcttggtgggatctcggataaaaagaacaggataccgctgcatacaacggcaggcatagcatatactggtataaacaatgatgtttacactgagacaaagctttatgtatcaaaagatgaaaaatgctatattgatggaaaggaaattgatttaaattcagatagatcaccatcgaaggttattgataaattcaagcatgaaatacttatgagagtaaatcttgatgatgaaaataacctttcaattgattcaaggaactttaatatattaagtggcagctcagattctggggccgctgcactgggagagtgcatagaatcaatttttgaatacaatataaatatatttacatttgaaaacgatcttcagaggatatcagaaagtgttggaagaagcctttacggtggtttaacagtaaactatgccaatggcagggaatcattaacagagccattacttgagcctgaggcatttaataactttacaataattggtgcacattttaacattgatagaaaaccatcaaatgagattcatgaaaatatcataaaacatgaaaattacagggaaagaataaaaagtgctgagagaaaggcgaaaaaacttgaggagctatcaaggaatgcaaacataaagggtatctttgaacttgcagaatccgatacagtggaataccataaaatgctccatgatgttggcgttgacataataaatga

SEQ ID NO: 117 - protein, 324 aa, Unknown
  Picrophilus torridus Sequence
MENYNVKTRAFPTIGIILLGGISDKKNRIPLHTTAGIAYTGINNDVYTETKLYVSKDEKCYIDGKEIDLNSDRSPSKVIDKFKHEILMRVNLDDENNLSIDSRNFNILSGSSDSGAAALGECIESIFEYNINIFTFENDLQRISESVGRSLYGGLTVNYANGRESLTEPLLEPEAFNNFTIIGAHFNIDRKPSNEIHENIIKHENYRERIKSAERKAKKLEELSRNANIKGIFELAESDTVEYHKMLHDVGVDIINDRMENLIERVKEMKNNFWNSYIVTGGPNVFVITEKKDVDKAMEGLNDLCDDIRLLKVAGKPQVISKNF

SEQ ID NO: 118 - DNA, 660 bp, Streptococcus mitis
atggatagagagcctgtaacagtacgttcctacgcaaatattgccattatcaaatactggggaaagaaaaaagaaaaagagatggttcctgctactagcagtatttctctgactttggaaaatatgtacacggagacgaccttgtcatctctaccgacggatgcgacagctgatgcattttatatcaatggtcagttacaaaatgaggcagagcatgtcaagatgagtaagattattgaccgctaccgtccagatggtgatggctttgttcgtatcgatactcaaaacagtatgcctaccgcagcgggcttgtcatcaagttctagtggtttgtctgccttggtcaaggcttgtaatgcttatttcaagcttggtttgaatcggagtcagttggcacaggaggctaagtttgcctcaggctcttcctctcggagtttttatggaccactcggtgcctgggataaggatagcggagagatttacccggtagagacaggcctgaaactagctatgattatgttggtgctagaagacaagaaaaaaccaatctctagccgtgatgggatgaaactttgtgtggaaacttcgacgacctttgacgactgggtgcgtcagtctgagaaggattatcaggatatgctggtttacctcaaggcaaat

SEQ ID NO: 119 - protein, 317 aa, Streptococcus mitis
MDREPVTVRSYANIAIIKYWGKKKEKEMVPATSSISLTLENMYTETTLSSLPTDATADAFYINGQLQNEAEHVKMSKIIDRYRPDGDGFVRIDTQNSMPTAAGLSSSSSGLSALVKACNAYFKLGLNRSQLAQEAKFASGSSSRSFYGPLGAWDKDSGEIYPVETGLKLAMIMLVLEDKKKPISSRDGMKLCVETSTTFDDWVRQSEKDYQDMLVYLKANDFAKVGELTEKNALAMHATTKTASPAFSYLTDASYEAMDFVRQLREQGEACYFTMDAGPNVKVLCQEKDLEHLSEIFGQRYRLIVSKTKDLSQDGCC

SEQ ID NO: 120 - DNA, 948 bp, Streptococcus gordonii
atggatcgaaagcctgtaagtgtcaaatcctatgccaatattgcaattgtcaaatattggggcaagaaagatgcagaaaagatgattccgtctacaagcagtatctcactgacactggaaaatatgtataccgagacgcagctgagtcctttgccggatacagcgactggtgatgagttttatattgacggtcagctgcaaagcccggcagaacatgccaaaatcagtaaaattattgaccgttttcgctctccagaagatggttttgtccgtgttgataccagcaataatatgccaacagcagcagggctgtcttccagctccagcggtctatctgctctggtcaaggcttgcaatgcttattttcagacaggctatcagacggaagaactggctcaactggccaagtttgcttcagggtcctctgctcggtctttctttggtccgctagcggcctgggataaggacagtggagccatctatccagtcaagacggatttgaagctagccatgattatgctggttctgcacgatgagaaaaagcccatttccagccgcgacggtatggagctctgtgctaaaacttccacaattttcccagattggattgcccaatctgccttggattatcaggccatgctaggctatttgcaggacaatgattttgccaaggttggtcaactgacggaagaaaatgcccttcggatgcatgctacaacagaaaaagcttatccgccgttttcttatctgacagaggagtcttatcaggctatggatgctgtcagaaagctacgggagcagggcgagcgttgctactttaccatggatgcggggccaaatgtcaaggtgctctgcttggaggaagatctagaccatttggctgccatatttgagaaggactatcgccttattgtctccaaaacaaaggacttgtcagatgaaagctag

SEQ ID NO: 121 - protein, 315 aa, Streptococcus gordonii
MDRKPVSVKSYANIAIVKYWGKKDAEKMIPSTSSISLTLENMYTETQLSPLPDTATGDEFYIDGQLQSPAEHAKISKIIDRFRSPEDGFVRVDTSNNMPTAAGLSSSSSGLSALVKACNAYFQTGYQTEELAQLAKFASGSSARSFFGPLAAWDKDSGAIYPVKTDLKLAMIMLVLHDEKKPISSRDGMELCAKTSTIFPDWIAQSALDYQAMLGYLQDNDFAKVGQLTEENALRMHATTEKAYPPFSYLTEESYQAMDAVRKLREQGERCYFTMDAGPNVKVLCLEEDLDHLAAIFEKDYRLIVSKTKDLSDES

SEQ ID NO: 122 - DNA, 1476 bp, Saccharomyces cerevisiae
atgaaactctcaactaaactttgttggtgtggtattaaaggaagacttaggccgcaaaagcaacaacaattacacaatacaaacttgcaaatgactgaactaaaaaaacaaaagaccgctgaacaaaaaaccagacctcaaaatgtcggtattaaaggtatccaaatttacatcccaactcaatgtgtcaaccaatctgagctagagaaatttgatggcgtttctcaaggtaaatacacaattggtctgggccaaaccaacatgtcttttgtcaatgacagagaagatatctactcgatgtccctaactgttttgtctaagttgatcaagagttacaacatcgacaccaacaaaattggtagattagaagtcggtactgaaactctgattgacaagtccaagtctgtcaagtctgtcttgatgcaattgtttggtgaaaacactgacgtcgaaggtattgacacgcttaatgcctgttacggtggtaccaacgcgttgttcaactctttgaactggattgaatctaacgcatgggatggtagagacgccattgtagtttgcggtgatattgccatctacgataagggtgccgcaagaccaaccggtggtgccggtactgttgctatgtggatcggtcctgatgctccaattgtatttgactctgtaagagcttcttacatggaacacgcctacgatttttacaagccagatttcaccagcgaatatccttacgtcgatggtcatttttcattaacttgttacgtcaaggctcttgatcaagtttacaagagttattccaagaaggctatttctaaagggttggttagcgatcccgctggttcggatgctttgaacgttttgaaatatttcgactacaacgttttccatgttccaacctgtaaattggtcacaaaatcatacggtagattactatataacgatttcagagccaatcctcaattgttcccagaagttgacgccgaattagctactcgcgattatgacgaatctttaaccgataagaacattgaaaaaacttttgttaatgttgctaagccattccacaaagagagagttgcccaatctttgattgttccaacaaacacaggtaacatgtacaccgcatctgtttatgccgcctttgcatctctattaaactatgttggatctgacgacttacaaggcaagcgtgttggtttattttcttacggttccggtttagctgcatctctatattcttgcaaaattgttggtgacgtccaacatattatcaaggaattagatattactaacaaattagccaagagaatcaccgaaactccaaaggattacgaagctgccatcgaattgagagaaaatgcccatttgaagaagaacttcaaacctcaaggttccattgagcatttgcaaagtggtgtttactacttgaccaacatcgatgacaaatttagaagatcttacgatgttaaaaaataa

SEQ ID NO: 123 - protein, 491 aa, Saccharomyces cerevisiae; identical to SEQ ID NO: 107

SEQ ID NO: 124 - DNA, 816 bp, Pseudomonas putida
atgagcgatttcagcaccctcgaagtgatccgcgacccgcgcggcttcgccaccctgtggttaagccgtgaggacaagaacaacgccttcaatgcgcagatgatccgcgagctgatcgtggccatcgaccagttggccgaagacgccagcctgcgctttgtgctgctgcgcggccgtggccggcacttcagcgccggtgccgacctggcctggatgcagcagtcggcgcaactggacttcaacaccaacctggatgatgcccacgaactgggcgagctgatgtacgccctgcatcgcctcaaggccccgaccctggccgtggtgcaaggtgcagcctttggcggcgcgctgggcctgatcagctgctgcgacatggccatcggcgccgaagacgcccaactgtgcctgtcggaagtacgcatcggcctggccccggcggtcatcagcccgttcgtggtcaaggccattggcgaacgcgccgcgcgccgctacgccctcaccgccgagcgtttcactggcgtgcgcgcacgcgagctgggcctgctggccgaggtgtacccggccagcgaactggacgaccacgtcgaagcctgggtaagcaacctgctgcagaacagcccgcaagcattgcgcgccaccaaggacttgctgcgcgaagtggacgacggcgaactcagcccggccctgcgccgttactgcgaaaacaccatcgcccgtatccgcgtcagcgccgaaggccaggagggcctgcgcgctttcctggaaaaacgccgccctgcctggcaaaccgttgacaagaaggagccgcgcccatga

SEQ ID NO: 125 - protein, 271 aa, Pseudomonas putida
MSDFSTLEVIRDPRGFATLWLSREDKNNAFNAQMIRELIVAIDQLAEDASLRFVLLRGRGRHFSAGADLAWMQQSAQLDFNTNLDDAHELGELMYALHRLKAPTLAVVQGAAFGGALGLISCCDMAIGAEDAQLCLSEVRIGLAPAVISPFVVKAIGERAARRYALTAERFTGVRARELGLLAEVYPASELDDHVEAWVSNLLQNSPQALRATKDLLREVDDGELSPALRRYCENTIARIRVSAEGQEGLRAFLEKRRPAWQTVDKKEPRP

SEQ ID NO: 126 - DNA, 1608 bp, Pseudomonas aeruginosa
atggccatcctgcacacccagatcaatccacgctccgccgagttcgcggccaacgccgcgaccatgctggaacaggtcaacgccctgcgcaccctcctcggccgcatccacgaaggcggcggtagcgccgcccaggcccggcacagcgcgcgcggcaagctgctggtgcgcgaacgcatcaaccgcctgctcgaccccggctcgccgttcctcgagctttccgccctcgccgcccacgaagtctacggcgaagaggtcgccgccgccggcatcgtcgccgggatcggccgggtcgaaggggtggaatgcatgatcgtcggcaacgatgccacggtgaagggcggcacctactatccgctgaccgtgaagaagcacctgcgggcccaggccatcgccctggagaaccgcctgccatgcatctacctggtggactctggcggcgccaacctgccgcgccaggacgaggtgttccccgaccgcgagcacttcggccggatcttcttcaaccaggccaacatgagtgcccgcggcatcccgcagatcgccgtggtcatgggctcctgcaccgccggcggggcctacgtgccggcgatgtccgacgaaaccgtgatggtgcgcgaacaggccaccatcttcctcgccgggccgccgctggtgaaggccgctaccggcgaggtggtcagcgccgaggaacttggcggcgccgacgtgcactgcaaggtctcaggggtcgccgaccactatgccgaggacgatgaccatgccctggccatcgcccgccgctgcgtcgccaacctcaactggcgcaagcagggccagctgcaatgccgtgcaccgcgcgcgccgctgtaccccgccgaggagctgtacggggtgattcccgccgacagcaagcagccctacgacgtgcgcgaagtgatcgcacggctggtggacggctccgagttcgacgaattcaaggcgctgttcggcaccaccctggtctgcggcttcgcccacctgcacggctatccgatcgccatcctggccaacaacgggatcctcttcgccgaggccgcgcagaaaggcgcgcacttcatcgagttggcctgccagcgtggcatcccgctgctgttcctgcagaacatcaccggtttcatggtcggccagaagtacgaggctggcggcatcgccaagcacggcgccaagctggtgaccgcggtggcctgcgcgcgggtgccgaagttcaccgtgctgatcggcggcagcttcggcgccggcaactacggcatgtgcggacgcgcctacgacccgcgcttcctgtggatgtggccgaacgcgaggatcggcgtgatgggcggcgaacaggccgccggggtgctcgcccaggtcaagcgcgagcaggccgagcgcgccggccagcagctcggcgtcgaagaggaggcgaagatcaaggcgccgatcctcgagcagtacgagcaccagggccatccctactactccagcgcgcgactgtgggacgacggcgtgatcgatccggcgcagacccgcgaggtcctcgccctggcgctttccgccgccctcaacgcccccatcgagccgaccgccttcggcgtgttccgcatgtga

SEQ ID NO: 127 - protein, 535 aa, Pseudomonas aeruginosa
MAILHTQINPRSAEFAANAATMLEQVNALRTLLGRIHEGGGSAAQARHSARGKLLVRERINRLLDPGSPFLELSALAAHEVYGEEVAAAGIVAGIGRVEGVECMIVGNDATVKGGTYYPLTVKKHLRAQAIALENRLPCIYLVDSGGANLPRQDEVFPDREHFGRIFFNQANMSARGIPQIAVVMGSCTAGGAYVPAMSDETVMVREQATIFLAGPPLVKAATGEVVSAEELGGADVHCKVSGVADHYAEDDDHALAIARRCVANLNWRKQGQLQCRAPRAPLYPAEELYGVIPADSKQPYDVREVIARLVDGSEFDEFKALFGTTLVCGFAHLHGYPIAILANNGILFAEAAQKGAHFIELACQRGIPLLFLQNITGFMVGQKYEAGGIAKHGAKLVTAVACARVPKFTVLIGGSFGAGNYGMCGRAYDPRFLWMWPNARIGVMGGEQAAGVLAQVKREQAERAGQQLGVEEEAKIKAPILEQYEHQGHPYYSSARLWDDGVIDPAQTREVLALALSAALNAPIEPTAFGVFRM

SEQ ID NO: 128 - DNA, 1968 bp, Pseudomonas aeruginosa
atgaacccggactaccgcagcatccagcgcctcctggtcgccaaccgcggcgagatcgcctgccgggtgatgcgcagcgcgcgcgccctcggcatcggcagcgtcgccgtgcacagcgacatcgaccgccacgcccgccacgtcgccgaagccgacatcgccgtcgacctgggcggcgccaagcccgccgacagctacctgcgcggcgacaggatcatcgcagctgccctcgccagcggcgcccaggcgatccaccccggctacggcttcctctcggagaacgccgacttcgcccgcgcctgcgaggaagccggcctgctcttcctcggaccgccggcggcggccatcgacgccatgggcagcaagtcggccgccaaggcgctgatggaagaagccggcgtgccgctggtgcccggctatcacggcgaagcccaggacctcgagactttccgccgggaagccgggcgcatcggctacccggtgctgctcaaggccgccgctggcggcggcggcaagggcatgaaggtggtggagcgcgaggccgagctggccgaggccctttcctccgcccagcgcgaggccaaggccgccttcggcgacgcgcgtatgctggtggagaaatacctgctgaagccgcgccacgtggagatccaggtattcgccgaccgccatggccactgcctgtacctcaacgaacgcgactgttcgatccagcgccgccaccagaaggtcgtcgaggaagcccccgcccccggtctcggcgcggaactgcgccgggccatgggcgaggccgcggtacgcgcggcgcaggcgatcggctacgtcggcgccggtaccgtcgaattcctcctcgacgaacgcggccagttcttcttcatggaaatgaacacccgcctgcaggtggaacacccggtcaccgaggccatcaccggcctcgacctggtcgcctggcagatccgcgtcgctcgcggcgaggcgctaccgctgacgcaggaacaggtaccgctgaacggccacgccatcgaagtacggctctatgcggaagaccccgagggcgacttcctccccgccagcggccgcctgatgctataccgcgaagcggccgccggccccggccggcgggtcgacagcggggtacgcgaaggcgacgaggtctcgccgttctacgacccgatgctggccaagctgatcgcctggggcgaaacccgcgaggaagcccgccagcgcctgctggcgatgctggcggaaacctcggtcggcggcctgcgcaccaacctggcgttcctccgccgcatcctcggccatccggcgttcgccgccgccgaactggacaccgggttcatcgcgcgccaccaagacgacctgctgccggcgccgcaagcgctgccggagcatttctggcaagccgccgccgaagcctggctgcagagcgaaccgggccaccgtcgcgacgacgacccgcattcgccgtggagccgcaacgacggctggcgcagcgccctggcgcgggagtccgacctgatgctgcgctgccgcgacgaacgccgctgcgtccgcctgcgccacgccagccccagccagtatcgcctcgacggcgacgacctggtcagccgggtggacggtgtcacccgtcgctcggcggcgttgcgccgcggacgccaattgttcctcgaatgggagggcgaactgctggccatcgaagccgtcgacccgatcgccgaggccgaggccgcccatgcccaccagggcggtttgagcgcgccgatgaacggcagtatcgtgcgggtcctggtcgagcccggccagacggtcgaagccggcgccaccctggtggtgctggaggcgatgaagatggaacacagcatccgcgcgccccacgccggggtagtgaaggcgctgtattgcagcgagggcgaactggtcgaggaaggcacgccgctggtggagctggacgagaaccaggcctga

SEQ ID NO: 129 - protein, 655 aa, Pseudomonas aeruginosa
MNPDYRSIQRLLVANRGEIACRVMRSARALGIGSVAVHSDIDRHARHVAEADIAVDLGGAKPADSYLRGDRIIAAALASGAQAIHPGYGFLSENADFARACEEAGLLFLGPPAAAIDAMGSKSAAKALMEEAGVPLVPGYHGEAQDLETFRREAGRIGYPVLLKAAAGGGGKGMKVVEREAELAEALSSAQREAKAAFGDARMLVEKYLLKPRHVEIQVFADRHGHCLYLNERDCSIQRRHQKVVEEAPAPGLGAELRRAMGEAAVRAAQAIGYVGAGTVEFLLDERGQFFFMEMNTRLQVEHPVTEAITGLDLVAWQIRVARGEALPLTQEQVPLNGHAIEVRLYAEDPEGDFLPASGRLMLYREAAAGPGRRVDSGVREGDEVSPFYDPMLAKLIAWGETREEARQRLLAMLAETSVGGLRTNLAFLRRILGHPAFAAAELDTGFIARHQDDLLPAPQALPEHFWQAAAEAWLQSEPGHRRDDDPHSPWSRNDGWRSALARESDLMLRCRDERRCVRLRHASPSQYRLDGDDLVSRVDGVTRRSAALRRGRQLFLEWEGELLAIEAVDPIAEAEAAHAHQGGLSAPMNGSIVRVLVEPGQTVEAGATLVVLEAMKMEHSIRAPHAGVVKALYCSEGELVEEGTPLVELDENQA

SEQ ID NO: 130 - DNA, 1164 bp, Escherichia coli
atggaacaggttgtcattgtcgatgcaattcgcaccccgatgggccgttcgaagggcggtgcttttcgtaacgtgcgtgcagaagatctctccgctcatttaatgcgtagcctgctggcgcgtaacccggcgctggaagcggcggccctcgacgatatttactggggttgtgtgcagcagacgctggagcagggttttaatatcgcccgtaacgcggcgctgctggcagaagtaccacactctgtcccggcggttaccgttaatcgcttgtgtggttcatccatgcaggcactgcatgacgcagcacgaatgatcatgactggcgatgcgcaggcatgtctggttggcggcgtggagcatatgggccatgtgccgatgagtcacggcgtcgattttcaccccggcctgagccgcaatgtcgccaaagcggcgggcatgatgggcttaacggcagaaatgctggcgcgtatgcacggtatcagccgtgaaatgcaggatgcctttgccgcgcggtcacacgcccgcgcctgggccgccacgcagtcggccgcatttaaaaatgaaatcatcccgaccggtggtcacgatgccgacggcgtcctgaagcagtttaattacgacgaagtgattcgcccggaaaccaccgtggaagccctcgccacgctgcgtccggcgtttgatccagtaaacggtatggtaacggcgggcacatcttctgcactttccgatggcgcagctgccatgctggtgatgagtgaaagccgcgcccatgaattaggtcttaagccgcgcgctcgtgtgcgttcgatggcggtcgttggttgtgacccatcgattatgggttacggcccggttccggcctcgaaactggcgctgaaaaaagcggggctttctgccagcgatatcggcgtgtttgaaatgaacgaagcctttgccgcgcagatcctgccatgtattaaagatctgggactaattgagcagattgacgagaagatcaacctcaacggtggcgcgatcgcgctgggtcatccgctgggttgttccggtgcgcgtatcagcaccacgctgctgaatctgatggaacgcaaagacgttcagtttggtctggcgacgatgtgtatcggtctgggtcagggtattgcgacggtgtttgagcgggtttaa

SEQ ID NO: 131 - protein, 387 aa, Escherichia coli
MEQVVIVDAIRTPMGRSKGGAFRNVRAEDLSAHLMRSLLARNPALEAAALDDIYWGCVQQTLEQGFNIARNAALLAEVPHSVPAVTVNRLCGSSMQALHDAARMIMTGDAQACLVGGVEHMGHVPMSHGVDFHPGLSRNVAKAAGMMGLTAEMLARMHGISREMQDAFAARSHARAWAATQSAAFKNEIIPTGGHDADGVLKQFNYDEVIRPETTVEALATLRPAFDPVNGMVTAGTSSALSDGAAAMLVMSESRAHELGLKPRARVRSMAVVGCDPSIMGYGPVPASKLALKKAGLSASDIGVFEMNEAFAAQILPCIKDLGLIEQIDEKINLNGGAIALGHPLGCSGARISTTLLNLMERKDVQFGLATMCIGLGQGIATVFERV

SEQ ID NO: 132 - DNA, 2190 bp, Escherichia coli
atgctttacaaaggcgacaccctgtaccttgactggctggaagatggcattgccgaactggtatttgatgccccaggttcagttaataaactcgacactgcgaccgtcgccagcctcggcgaggccatcggcgtgctggaacagcaatcagatctaaaagggctgctgctgcgttcgaacaaagcagcctttatcgtcggtgctgatatcaccgaatttttgtccctgttcctcgttcctgaagaacagttaagtcagtggctgcactttgccaatagcgtgtttaatcgcctggaagatctgccggtgccgaccattgctgccgtcaatggctatgcgctgggcggtggctgcgaatgcgtgctggcgaccgattatcgtctggcgacgccggatctgcgcatcggtctgccggaaaccaaactgggcatcatgcctggctttggcggttctgtacgtatgccacgtatgctgggcgctgacagtgcgctggaaatcattgccgccggtaaagatgtcggcgcggatcaggcgctgaaaatcggtctggtggatggcgtagtcaaagcagaaaaactggttgaaggcgcaaaggcggttttacgccaggccattaacggcgacctcgactggaaagcaaaacgtcagccgaagctggaaccactaaaactgagcaagattgaagccaccatgagcttcaccatcgctaaagggatggtcgcacaaacagcggggaaacattatccggcccccatcaccgcagtaaaaaccattgaagctgcggcccgttttggtcgtgaagaagccttaaacctggaaaacaaaagttttgtcccgctggcgcataccaacgaagcccgcgcactggtcggcattttccttaacgatcaatatgtaaaaggcaaagcgaagaaactcaccaaagacgttgaaaccccgaaacaggccgcggtgctgggtgcaggcattatgggcggcggcatcgcttaccagtctgcgtggaaaggcgtgccggttgtcatgaaagatatcaacgacaagtcgttaaccctcggcatgaccgaagccgcgaaactgctgaacaagcagcttgagcgcggcaagatcgatggtctgaaactggctggcgtgatctccacaatccacccaacgctcgactacgccggatttgaccgcgtggatattgtggtagaagcggttgttgaaaacccgaaagtgaaaaaagccgtactggcagaaaccgaacaaaaagtacgccaggataccgtgctggcgtctaacacttcaaccattcctatcagcgaactggccaacgcgctggaacgcccggaaaacttctgcgggatgcacttctttaacccggtccaccgaatgccgttggtagaaattattcgcggcgagaaaagctccgacgaaaccatcgcgaaagttgtcgcctgggcgagcaagatgggcaagacgccgattgtggttaacgactgccccggcttctttgttaaccgcgtgctgttcccgtatttcgccggtttcagccagctgctgcgcgacggcgcggatttccgcaagatcgacaaagtgatggaaaaacagtttggctggccgatgggcccggcatatctgctggacgttgtgggcattgataccgcgcatcacgctcaggctgtcatggcagcaggcttcccgcagcggatgcagaaagattaccgcgatgccatcgacgcgctgtttgatgccaaccgctttggtcagaagaacggcctcggtttctggcgttataaagaagacagcaaaggtaagccgaagaaagaagaagacgccgccgttgaagacctgctggcagaagtgagccagccgaagcgcgatttcagcgaagaagagattatcgcccgcatgatgatcccgatggtcaacgaagtggtgcgctgtctggaggaaggcattatcgccactccggcggaagcggatatggcgctggtctacggcctgggcttccctccgttccacggcggcgcgttccgctggctggacaccctcggtagcgcaaaatacctcgatatggcacagcaatatcagcacctcggcccgctgtatgaagtgccggaaggtctgcgtaataaagcgcgtcataacgaaccgtactatcctccggttgagccagcccgtccggttggcgacctgaaaacggcttaa

SEQ ID NO: 133 - protein, 729 aa, Escherichia coli
MLYKGDTLYLDWLEDGIAELVFDAPGSVNKLDTATVASLGEAIGVLEQQSDLKGLLLRSNKAAFIVGADITEFLSLFLVPEEQLSQWLHFANSVFNRLEDLPVPTIAAVNGYALGGGCECVLATDYRLATPDLRIGLPETKLGIMPGFGGSVRMPRMLGADSALEIIAAGKDVGADQALKIGLVDGVVKAEKLVEGAKAVLRQAINGDLDWKAKRQPKLEPLKLSKIEATMSFTIAKGMVAQTAGKHYPAPITAVKTIEAAARFGREEALNLENKSFVPLAHTNEARALVGIFLNDQYVKGKAKKLTKDVETPKQAAVLGAGIMGGGIAYQSAWKGVPVVMKDINDKSLTLGMTEAAKLLNKQLERGKIDGLKLAGVISTIHPTLDYAGFDRVDIVVEAVVENPKVKKAVLAETEQKVRQDTVLASNTSTIPISELANALERPENFCGMHFFNPVHRMPLVEIIRGEKSSDETIAKVVAWASKMGKTPIVVNDCPGFFVNRVLFPYFAGFSQLLRDGADFRKIDKVMEKQFGWPMGPAYLLDVVGIDTAHHAQAVMAAGFPQRMQKDYRDAIDALFDANRFGQKNGLGFWRYKEDSKGKPKKEEDAAVEDLLAEVSQPKRDFSEEEIIARMMIPMVNEVVRCLEEGIIATPAEADMALVYGLGFPPFHGGAFRWLDTLGSAKYLDMAQQYQHLGPLYEVPEGLRNKARHNEPYYPPVEPARPVGDLKTA

SEQ ID NO: 134 - DNA, 861 bp, Escherichia coli
atgagtcaggcgctaaaaaatttactgacattgttaaatctggaaaaaattgaggaaggactctttcgcggccagagtgaagatttaggtttacgccaggtgtttggcggccaggtcgtgggtcaggccttgtatgctgcaaaagagaccgtccctgaagagcggctggtacattcgtttcacagctactttcttcgccctggcgatagtaagaagccgattatttatgatgtcgaaacgctgcgtgacggtaacagcttcagcgcccgccgggttgctgctattcaaaacggcaaaccgattttttatatgactgcctctttccaggcaccagaagcgggtttcgaacatcaaaaaacaatgccgtccgcgccagcgcctgatggcctcccttcggaaacgcaaatcgcccaatcgctggcgcacctgctgccgccagtgctgaaagataaattcatctgcgatcgtccgctggaagtccgtccggtggagtttcataacccactgaaaggtcacgtcgcagaaccacatcgtcaggtgtggatccgcgcaaatggtagcgtgccggatgacctgcgcgttcatcagtatctgctcggttacgcttctgatcttaacttcctgccggtagctctacagccgcacggcatcggttttctcgaaccggggattcagattgccaccattgaccattccatgtggttccatcgcccgtttaatttgaatgaatggctgctgtatagcgtggagagcacctcggcgtccagcgcacgtggctttgtgcgcggtgagttttatacccaagacggcgtactggttgcctcgaccgttcaggaaggggtgatgcgtaatcacaattaa

SEQ ID NO: 135 - protein, 286 aa, Escherichia coli
MSQALKNLLTLLNLEKIEEGLFRGQSEDLGLRQVFGGQVVGQALYAAKETVPEERLVHSFHSYFLRPGDSKKPIIYDVETLRDGNSFSARRVAAIQNGKPIFYMTASFQAPEAGFEHQKTMPSAPAPDGLPSETQIAQSLAHLLPPVLKDKFICDRPLEVRPVEFHNPLKGHVAEPHRQVWIRANGSVPDDLRVHQYLLGYASDLNFLPVALQPHGIGFLEPGIQIATIDHSMWFHRPFNLNEWLLYSVESTSASSARGFVRGEFYTQDGVLVASTVQEGVMRNHN

SEQ ID NO: 136 - DNA, 1056 bp, Clostridium beijerinckii
atgaaaggttttgcaatgctaggtattaataagttaggatggatcgaaaaagaaaggccagttgcgggttcatatgatgctattgtacgcccattagcagtatctccgtgtacatcagatatacatactgtttttgagggagctcttggagataggaagaatatgattttagggcatgaagctgtaggtgaagttgttgaagtaggaagtgaagtgaaggattttaaacctggtgacagagttatagttccttgtacaactccagattggagatctttggaagttcaagctggttttcaacagcactcaaacggtatgctcgcaggatggaaattttcaaatttcaaggatggagtttttggtgaatattttcatgtaaatgatgcggatatgaatcttgcgattctacctaaagacatgccattagaaaatgctgttatgataacagatatgatgactactggatttcatggagcagaacttgcagatattcaaatgggttcaagtgttgtggtaattggcattggagctgttggcttaatgggaatagcaggtgctaaattacgtggagcaggtagaataattggagtggggagcaggccgatttgtgttgaggctgcaaaattttatggagcaacagatattctaaattataaaaatggtcatatagttgatcaagttatgaaattaacgaatggaaaaggcgttgaccgcgtaattatggcaggcggtggttctgaaacattatcccaagcagtatctatggttaaaccaggaggaataatttctaatataaattatcatggaagtggagatgctttactaataccacgtgtagaatggggatgtggaatggctcacaagactataaaaggaggtctttgtcctgggggacgtttgagagcagaaatgttaagagatatggtagtatataatcgtgttgatctaagtaaattagttacacatgtatatcatggatttgatcacatagaagaagcactgttattaatgaaagacaagccaaaagacttaattaaagcagtagttatattataa

SEQ ID NO: 137 - DNA, 1056 bp, Clostridium beijerinckii
atgaaagggtttgccatgttaggtatcaataaactgggctggattgaaaaagagcgcccggtggcgggttcatacgatgcaattgttcgtccgctggccgtcagtccgtgcaccagcgacatccatacagtctttgaaggtgccctgggtgatcggaaaaacatgattctgggccatgaagccgtaggcgaagtagtggaagtgggcagcgaggtaaaggatttcaaaccgggtgatcgcgtaattgttccttgcacgaccccagattggcgctcactggaagttcaggctggttttcagcagcatagtaacggtatgttagcaggctggaagtttagcaattttaaagacggggtgttcggggagtattttcatgtcaacgatgcggacatgaatctggctattttacctaaagatatgccgctggagaacgcagtgatgattaccgacatgatgacgacaggctttcacggtgcagaactggctgacatccaaatgggctccagtgtggtggttatcggtattggtgcggtcgggctgatgggtatcgcgggcgcgaaattacggggcgctggtcgcatcatcggtgtcggcagccgtccaatttgcgttgaagcagctaaattctatggtgccacggacattctgaactataaaaatggtcacatcgtcgatcaggtgatgaaactgaccaatggcaaaggtgtggaccgcgtgatcatggcgggcggcggctcagagactttatctcaagcggtgtctatggttaaacctgggggcatcatttctaatattaactatcatggctccggcgacgcattactgatcccgcgtgttgaatggggctgtgggatggcccacaaaaccattaaaggggggttatgtccgggtggtcgcctgcgtgccgaaatgctgcgtgacatggtggtttacaaccgtgtggatctgtccaaactggtaactcacgtataccacggtttcgatcacattgaagaggcgctgctgctgatgaaggataagccaaaggatctgattaaggcggttgttatcctgtaa

SEQ ID NO: 138 - protein, 351 aa, Clostridium beijerinckii
MKGFAMLGINKLGWIEKERPVAGSYDAIVRPLAVSPCTSDIHTVFEGALGDRKNMILGHEAVGEVVEVGSEVKDFKPGDRVIVPCTTPDWRSLEVQAGFQQHSNGMLAGWKFSNFKDGVFGEYFHVNDADMNLAILPKDMPLENAVMITDMMTTGFHGAELADIQMGSSVVVIGIGAVGLMGIAGAKLRGAGRIIGVGSRPICVEAAKFYGATDILNYKNGHIVDQVMKLTNGKGVDRVIMAGGGSETLSQAVSMVKPGGIISNINYHGSGDALLIPRVEWGCGMAHKTIKGGLCPGGRLRAEMLRDMVVYNRVDLSKLVTHVYHGFDHIEEALLLMKDKPKDLIKAVVIL

SEQ ID NO: 139 - DNA, 2580 bp, Unknown
  Clostridium carboxidivorans Sequence
atgaaggtaactaatgttgaagaactgatgaaaaaaatgcaggaagtgcaaaatgctcaaaaaaaatttgggagttttactcaggaacaagtagatgaaattttcaggcaagcagcactagcagctaacagtgccagaatagatctagctaaaatggcagtggaagaaactaaaatgggaattgtagaggataaggttataaaaaatcattttgttgcagaatacatatataataagtataaaaatgaaaaaacttgtgggattttggaagaagatgaaggctttggaatggttaaaattgcagaacctgtaggtgtgattgcagcagtaattccaacaacaaatccaacatctacagcaatatttaaagcattattagctttgaaaacaagaaatggtataattttttcaccacatccaagagcaaaaaagtgtactattgcagcagctaagttagttcttgatgctgcagttaaagcaggtgctcctaaaggaattataggttggatagatgaaccttctattgaactttcacagatagtaatgaaagaagctgatataatccttgcaacaggtggtccaggtatggttaaagcagcttattcttcaggtaaacctgctataggggttggtcctggtaacacacctgctttaattgatgaaagtgctgatattaaaatggcagtaaattcaatacttctttccaaaacttttgataatggtatgatttgtgcttcagagcagtcggtagtagttgtagattcaatatatgaagaagttaagaaagaatttgctcatagaggagcttatattttaagtaaggatgaaacaactaaagttggaaaaatactcttagttaatggtacattaaatgctggtatcgttggtcagagtgcttataaaatagcagaaatggcaggagttaaagttccagaagatgctaaagttcttataggagaagtaaaatcagtggagcattcagaagagccattttcacatgaaaagttatctccagttttagctatgtatagagctaaaaattttgatgaagctcttttaaaagctggaagattagttgaactcggtggaatgggtcatacatctgtattatatgtaaatgcaataactgaaaaagtaaaagtagaaaaatttagagaaactatgaagactggtagaacattaataaatatgccttcagcacaaggtgctataggagacatatataactttaaactagctccttcattaacattaggttgtggttcatggggaggaaactccgtatcagaaaatgttggacctaaacacttattaaatataaaaagtgttgctgagaggagagaaaatatgctttggtttagagttcctgaaaaggtttattttaaatatggtagtcttggagttgcattaaaagaattagatattttggataagaaaaaagtatttatagtaacagataaagttctttatcaattaggttatatagatagagttacaaagattcttgaagaattgaaaatttcatataaaatatttacagatgtagaaccagatccaaccctagctacagctaaaaaaggtgcagaagaattgttatcatttaatccagatactattatagcagttggtggtggttcagcaatggatgctgctaagattatgtgggtaatgtatgaacatccggaagtaagatttgaagatttagctatgagatttatggatataagaaagagagtatatacttttcctaagatgggtgaaaaagcaatgatgatttctgttgcaacatcagcaggaacaggatcagaagtaacaccttttgcagtaattactgatgaaaaaacaggagctaaatatccattagctgattatgaattaactccaaatatggctataattgatgctgaacttatgatgggtatgccaaaaggattaacagcagcttcaggaatagatgcactaactcatgcaatagaagcttatgtatcaataatggcttcagaatatactaatggattagcgttagaagcaataagattgatatttaagtatttaccaatagcttacagtgaaggaacaacaagtataaaggcaagagaaaaaatggcgcatgcttcaacaatagctggtatggcatttgctaatgcatttttaggagtatgtcattcaatggcacataaattaggatcaactcatcacgtaccacatggcattgccaatgcactacttataaatgaagttataaaatttaatgcagtagaaaatccaagaaaacaagctgcatttccacaatataagtatccaaatataaaaaagagatatgctagaatagcagattaccttaacttaggtgggtcaacagacgatgaaaaagtacaattattaataaatgctatagatgaattaaaagctaagataaatattccagaaagtattaaagaagcaggagtaacagaagaaaaattttatgctactttagataaaatgtcagaattagcttttgatgatcaatgtacaggtgcaaaccctagatatccattaataagtgaaataaaacaaatgtatgtaaatgcattttaa

SEQ ID NO: 140 - protein, 859 aa, Unknown
  Clostridium carboxidivorans Sequence
MKVTNVEELMKKMQEVQNAQKKFGSFTQEQVDEIFRQAALAANSARIDLAKMAVEETKMGIVEDKVIKNHFVAEYIYNKYKNEKTCGILEEDEGFGMVKIAEPVGVIAAVIPTTNPTSTAIFKALLALKTRNGIIFSPHPRAKKCTIAAAKLVLDAAVKAGAPKGIIGWIDEPSIELSQIVMKEADIILATGGPGMVKAAYSSGKPAIGVGPGNTPALIDESADIKMAVNSILLSKTFDNGMICASEQSVVVVDSIYEEVKKEFAHRGAYILSKDETTKVGKILLVNGTLNAGIVGQSAYKIAEMAGVKVPEDAKVLIGEVKSVEHSEEPFSHEKLSPVLAMYRAKNFDEALLKAGRLVELGGMGHTSVLYVNAITEKVKVEKFRETMKTGRTLINMPSAQGAIGDIYNFKLAPSLTLGCGSWGGNSVSENVGPKHLLNIKSVAERRENMLWFRVPEKVYFKYGSLGVALKELDILDKKKVFIVTDKVLYQLGYIDRVTKILEELKISYKIFTDVEPDPTLATAKKGAEELLSFNPDTIIAVGGGSAMDAAKIMWVMYEHPEVRFEDLAMRFMDIRKRVYTFPKMGEKAMMISVATSAGTGSEVTPFAVITDEKTGAKYPLADYELTPNMAIIDAELMMGMPKGLTAASGIDALTHAIEAYVSIMASEYTNGLALEAIRLIFKYLPIAYSEGTTSIKAREKMAHASTIAGMAFANAFLGVCHSMAHKLGSTHHVPHGIANALLINEVIKFNAVENPRKQAAFPQYKYPNIKKRYARIADYLNLGGSTDDEKVQLLINAIDELKAKINIPESIKEAGVTEEKFYATLDKMSELAFDDQCTGANPRYPLISEIKQMYVNAF

SEQ ID NO: 141 - DNA, 1401 bp, Escherichia coli
atgccacattcctacgattacgatgccatagtaataggttccggccccggcggcgaaggcgctgcaatgggcctggttaagcaaggtgcgcgcgtcgcagttatcgagcgttatcaaaatgttggcggcggttgcacccactggggcaccatcccgtcgaaagctctccgtcacgccgtcagccgcattatagaattcaatcaaaacccactttacagcgaccattcccgactgctccgctcttcttttgccgatatccttaaccatgccgataacgtgattaatcaacaaacgcgcatgcgtcagggattttacgaacgtaatcactgtgaaatattgcagggaaacgctcgctttgttgacgagcatacgttggcgctggattgcccggacggcagcgttgaaacactaaccgctgaaaaatttgttattgcctgcggctctcgtccatatcatccaacagatgttgatttcacccatccacgcatttacgacagcgactcaattctcagcatgcaccacgaaccgcgccatgtacttatctatggtgctggagtgatcggctgtgaatatgcgtcgatcttccgcggtatggatgtaaaagtggatctgatcaacacccgcgatcgcctgctggcatttctcgatcaagagatgtcagattctctctcctatcacttctggaacagtggcgtagtgattcgtcacaacgaagagtacgagaagatcgaaggctgtgacgatggtgtgatcatgcatctgaagtcgggtaaaaaactgaaagctgactgcctgctctatgccaacggtcgcaccggtaataccgattcgctggcgttacagaacattgggctagaaactgacagccgcggacagctgaaggtcaacagcatgtatcagaccgcacagccacacgtttacgcggtgggcgacgtgattggttatccgagcctggcgtcggcggcctatgaccaggggcgcattgccgcgcaggcgctggtaaaaggcgaagccaccgcacatctgattgaagatatccctaccggtatttacaccatcccggaaatcagctctgtgggcaaaaccgaacagcagctgaccgcaatgaaagtgccatatgaagtgggccgcgcccagtttaaacatctggcacgcgcacaaatcgtcggcatgaacgtgggcacgctgaaaattttgttccatcgggaaacaaaagagattctgggtattcactgctttggcgagcgcgctgccgaaattattcatatcggtcaggcgattatggaacagaaaggtggcggcaacactattgagtacttcgtcaacaccacctttaactacccgacgatggcggaagcctatcgggtagctgcgttaaacggtttaaaccgcctgttttaa

SEQ ID NO: 142 - protein, 466 aa, Escherichia coli
MPHSYDYDAIVIGSGPGGEGAAMGLVKQGARVAVIERYQNVGGGCTHWGTIPSKALRHAVSRIIEFNQNPLYSDHSRLLRSSFADILNHADNVINQQTRMRQGFYERNHCEILQGNARFVDEHTLALDCPDGSVETLTAEKFVIACGSRPYHPTDVDFTHPRIYDSDSILSMHHEPRHVLIYGAGVIGCEYASIFRGMDVKVDLINTRDRLLAFLDQEMSDSLSYHFWNSGVVIRHNEEYEKIEGCDDGVIMHLKSGKKLKADCLLYANGRTGNTDSLALQNIGLETDSRGQLKVNSMYQTAQPHVYAVGDVIGYPSLASAAYDQGRIAAQALVKGEATAHLIEDIPTGIYTIPEISSVGKTEQQLTAMKVPYEVGRAQFKHLARAQIVGMNVGTLKILFHRETKEILGIHCFGERAAEIIHIGQAIMEQKGGGNTIEYFVNTTFNYPTMAEAYRVAALNGLNRLF

SEQ ID NO: 143 - DNA, 1323 bp, Escherichia coli
atgcaagcctattttgaccagctcgatcgcgttcgttatgaaggctcaaaatcctcaaacccgttagcattccgtcactacaatcccgacgaactggtgttgggtaagcgtatggaagagcacttgcgttttgccgcctgctactggcacaccttctgctggaacggggcggatatgtttggtgtgggggcgtttaatcgtccgtggcagcagcctggtgaggcactggcgttggcgaagcgtaaagcagatgtcgcatttgagtttttccacaagttacatgtgccattttattgcttccacgatgtggatgtttcccctgagggcgcgtcgttaaaagagtacatcaataattttgcgcaaatggttgatgtcctggcaggcaagcaagaagagagcggcgtgaagctgctgtggggaacggccaactgctttacaaaccctcgctacggcgcgggtgcggcgacgaacccagatcctgaagtcttcagctgggcggcaacgcaagttgttacagcgatggaagcaacccataaattgggcggtgaaaactatgtcctgtggggcggtcgtgaaggttacgaaacgctgttaaataccgacttgcgtcaggagcgtgaacaactgggccgctttatgcagatggtggttgagcataaacataaaatcggtttccagggcacgttgcttatcgaaccgaaaccgcaagaaccgaccaaacatcaatatgattacgatgccgcgacggtctatggcttcctgaaacagtttggtctggaaaaagagattaaactgaacattgaagctaaccacgcgacgctggcaggtcactctttccatcatgaaatagccaccgccattgcgcttggcctgttcggttctgtcgacgccaaccgtggcgatgcgcaactgggctgggacaccgaccagttcccgaacagtgtggaagagaatgcgctggtgatgtatgaaattctcaaagcaggcggtttcaccaccggtggtctgaacttcgatgccaaagtacgtcgtcaaagtactgataaatatgatctgttttacggtcatatcggcgcgatggatacgatggcactggcgctgaaaattgcagcgcgcatgattgaagatggcgagctggataaacgcatcgcgcagcgttattccggctggaatagcgaattgggccagcaaatcctgaaaggccaaatgtcactggcagatttagccaaatatgctcaggaacatcatttgtctccggtgcatcagagtggtcgccaggaacaactggaaaatctggtaaaccattatctgttcgacaaataa

SEQ ID NO: 144 - protein, 440 aa, Escherichia coli
MQAYFDQLDRVRYEGSKSSNPLAFRHYNPDELVLGKRMEEHLRFAACYWHTFCWNGADMFGVGAFNRPWQQPGEALALAKRKADVAFEFFHKLHVPFYCFHDVDVSPEGASLKEYINNFAQMVDVLAGKQEESGVKLLWGTANCFTNPRYGAGAATNPDPEVFSWAATQVVTAMEATHKLGGENYVLWGGREGYETLLNTDLRQEREQLGRFMQMVVEHKHKIGFQGTLLIEPKPQEPTKHQYDYDAATVYGFLKQFGLEKEIKLNIEANHATLAGHSFHHEIATAIALGLFGSVDANRGDAQLGWDTDQFPNSVEENALVMYEILKAGGFTTGGLNFDAKVRRQSTDKYDLFYGHIGAMDTMALALKIAARMIEDGELDKRIAQRYSGWNSELGQQILKGQMSLADLAKYAQEHHLSPVHQSGRQEQLENLVNHYLFDK

SEQ ID NO: 145 - DNA, 1455 bp, Escherichia coli
atgtatatcgggatagatcttggcacctcgggcgtaaaagttattttgctcaacgagcagggtgaggtggttgctgcgcaaacggaaaagctgaccgtttcgcgcccgcatccactctggtcggaacaagacccggaacagtggtggcaggcaactgatcgcgcaatgaaagctctgggcgatcagcattctctgcaggacgttaaagcattgggtattgccggccagatgcacggagcaaccttgctggatgctcagcaacgggtgttacgccctgccattttgtggaacgacgggcgctgtgcgcaagagtgcactttgctggaagcgcgagttccgcaatcgcgggtgattaccggcaacctgatgatgcccggatttactgcgcctaaattgctatgggttcagcggcatgagccggagatattccgtcaaatcgacaaagtattattaccgaaagattacttgcgtctgcgtatgacgggggagtttgccagcgatatgtctgacgcagctggcaccatgtggctggatgtcgcaaagcgtgactggagtgacgtcatgctgcaggcttgcgacttatctcgtgaccagatgcccgcattatacgaaggcagcgaaattactggtgctttgttacctgaagttgcgaaagcgtggggtatggcgacggtgccagttgtcgcaggcggtggcgacaatgcagctggtgcagttggtgtgggaatggttgatgctaatcaggcaatgttatcgctggggacgtcgggggtctattttgctgtcagcgaagggttcttaagcaagccagaaagcgccgtacatagcttttgccatgcgctaccgcaacgttggcatttaatgtctgtgatgctgagtgcagcgtcgtgtctggattgggccgcgaaattaaccggcctgagcaatgtcccagctttaatcgctgcagctcaacaggctgatgaaagtgccgagccagtttggtttctgccttatctttccggcgagcgtacgccacacaataatccccaggcgaagggggttttctttggtttgactcatcaacatggccccaatgaactggcgcgagcagtgctggaaggcgtgggttatgcgctggcagatggcatggatgtcgtgcatgcctgcggtattaaaccgcaaagtgttacgttgattgggggcggggcgcgtagtgagtactggcgtcagatgctggcggatatcagcggtcagcagctcgattaccgtacggggggggatgtggggccagcactgggcgcagcaaggctggcgcagatcgcggcgaatccagagaaatcgctcattgaattgttgccgcaactaccgttagaacagtcgcatctaccagatgcgcagcgttatgccgcttatcagccacgacgagaaacgttccgtcgcctctatcagcaacttctgccattaatggcgtaa

SEQ ID NO: 146 - protein, 484 aa, Escherichia coli
MYIGIDLGTSGVKVILLNEQGEVVAAQTEKLTVSRPHPLWSEQDPEQWWQATDRAMKALGDQHSLQDVKALGIAGQMHGATLLDAQQRVLRPAILWNDGRCAQECTLLEARVPQSRVITGNLMMPGFTAPKLLWVQRHEPEIFRQIDKVLLPKDYLRLRMTGEFASDMSDAAGTMWLDVAKRDWSDVMLQACDLSRDQMPALYEGSEITGALLPEVAKAWGMATVPVVAGGGDNAAGAVGVGMVDANQAMLSLGTSGVYFAVSEGFLSKPESAVHSFCHALPQRWHLMSVMLSAASCLDWAAKLTGLSNVPALIAAAQQADESAEPVWFLPYLSGERTPHNNPQAKGVFFGLTHQHGPNELARAVLEGVGYALADGMDVVHACGIKPQSVTLIGGGARSEYWRQMLADISGQQLDYRTGGDVGPALGAARLAQIAANPEKSLIELLPQLPLEQSHLPDAQRYAAYQPRRETFRRLYQQLLPLMA

SEQ ID NO: 147 - DNA, 1992 bp, Escherichia coli
atgtcctcacgtaaagagcttgccaatgctattcgtgcgctgagcatggacgcagtacagaaagccaaatccggtcacccgggtgcccctatgggtatggctgacattgccgaagtcctgtggcgtgatttcctgaaacacaacccgcagaatccgtcctgggctgaccgtgaccgcttcgtgctgtccaacggccacggctccatgctgatctacagcctgctgcacctcaccggttacgatctgccgatggaagaactgaaaaacttccgtcagctgcactctaaaactccgggtcacccggaagtgggttacaccgctggtgtggaaaccaccaccggtccgctgggtcagggtattgccaacgcagtcggtatggcgattgcagaaaaaacgctggcggcgcagtttaaccgtccgggccacgacattgtcgaccactacacctacgccttcatgggcgacggctgcatgatggaaggcatctcccacgaagtttgctctctggcgggtacgctgaagctgggtaaactgattgcattctacgatgacaacggtatttctatcgatggtcacgttgaaggctggttcaccgacgacaccgcaatgcgtttcgaagcttacggctggcacgttattcgcgacatcgacggtcatgacgcggcatctatcaaacgcgcagtagaagaagcgcgcgcagtgactgacaaaccttccctgctgatgtgcaaaaccatcatcggtttcggttccccgaacaaagccggtacccacgactcccacggtgcgccgctgggcgacgctgaaattgccctgacccgcgaacaactgggctggaaatatgcgccgttcgaaatcccgtctgaaatctatgctcagtgggatgcgaaagaagcaggccaggcgaaagaatccgcatggaacgagaaattcgctgcttacgcgaaagcttatccgcaggaagccgctgaatttacccgccgtatgaaaggcgaaatgccgtctgacttcgacgctaaagcgaaagagttcatcgctaaactgcaggctaatccggcgaaaatcgccagccgtaaagcgtctcagaatgctatcgaagcgttcggtccgctgttgccggaattcctcggcggttctgctgacctggcgccgtctaacctgaccctgtggtctggttctaaagcaatcaacgaagatgctgcgggtaactacatccactacggtgttcgcgagttcggtatgaccgcgattgctaacggtatctccctgcacggtggcttcctgccgtacacctccaccttcctgatgttcgtggaatacgcacgtaacgccgtacgtatggctgcgctgatgaaacagcgtcaggtgatggtttacacccacgactccatcggtctgggcgaagacggcccgactcaccagccggttgagcaggtcgcttctctgcgcgtaaccccgaacatgtctacatggcgtccgtgtgaccaggttgaatccgcggtcgcgtggaaatacggtgttgagcgtcaggacggcccgaccgcactgatcctctcccgtcagaacctggcgcagcaggaacgaactgaagagcaactggcaaacatcgcgcgcggtggttatgtgctgaaagactgcgccggtcagccggaactgattttcatcgctaccggttcagaagttgaactggctgttgctgcctacgaaaaactgactgccgaaggcgtgaaagcgcgcgtggtgtccatgccgtctaccgacgcatttgacaagcaggatgctgcttaccgtgaatccgtactgccgaaagcggttactgcacgcgttgctgtagaagcgggtattgctgactactggtacaagtatgttggcctgaacggtgctatcgtcggtatgaccaccttcggtgaatctgctccggcagagctgctgtttgaagagttcggcttcactgttgataacgttgttgcgaaagcaaaagaactgctgtaa

SEQ ID NO: 148 - protein, 663 aa, Escherichia coli
MSSRKELANAIRALSMDAVQKAKSGHPGAPMGMADIAEVLWRDFLKHNPQNPSWADRDRFVLSNGHGSMLIYSLLHLTGYDLPMEELKNFRQLHSKTPGHPEVGYTAGVETTTGPLGQGIANAVGMAIAEKTLAAQFNRPGHDIVDHYTYAFMGDGCMMEGISHEVCSLAGTLKLGKLIAFYDDNGISIDGHVEGWFTDDTAMRFEAYGWHVIRDIDGHDAASIKRAVEEARAVTDKPSLLMCKTIIGFGSPNKAGTHDSHGAPLGDAEIALTREQLGWKYAPFEIPSEIYAQWDAKEAGQAKESAWNEKFAAYAKAYPQEAAEFTRRMKGEMPSDFDAKAKEFIAKLQANPAKIASRKASQNAIEAFGPLLPEFLGGSADLAPSNLTLWSGSKAINEDAAGNYIHYGVREFGMTAIANGISLHGGFLPYTSTFLMFVEYARNAVRMAALMKQRQVMVYTHDSIGLGEDGPTHQPVEQVASLRVTPNMSTWRPCDQVESAVAWKYGVERQDGPTALILSRQNLAQQERTEEQLANIARGGYVLKDCAGQPELIFIATGSEVELAVAAYEKLTAEGVKARVVSMPSTDAFDKQDAAYRESVLPKAVTARVAVEAGIADYWYKYVGLNGAIVGMTTFGESAPAELLFEEFGFTVDNVVAKAKELL

SEQ ID NO: 149 - DNA, 2004 bp, Escherichia coli
atgtcccgaaaagaccttgccaatgcgattcgcgcactcagtatggatgcggtacaaaaagccaactctggtcatcccggcgcgccgatgggcatggctgatattgccgaagtgctgtggaacgattttcttaaacataaccctaccgacccaacctggtatgatcgcgaccgctttattctttccaacggtcacgcgtcgatgctgctctacagtttgctacatctgaccggttacgacctgccgctggaagaactgaagaacttccgtcagttgcattcgaaaaccccaggccacccggagattggctatacgccaggcgttgaaaccaccaccggcccgcttggacaaggtttggcgaacgccgtcgggctggcgatagcagagcgtacactggcggcgcagtttaaccagccagaccatgagatcgtcgatcacttcacctatgtgtttatgggcgacggctgcctgatggaaggtatttcccacgaagtctgttcgctggcaggcacgctgggactgggcaagctgattggtttttacgatcacaacggtatttccatcgacggtgaaacagaaggctggtttaccgacgatacggcaaaacgttttgaagcctatcactggcatgtgatccatgaaatcgacggtcacgatccgcaggcggtgaaggaagcgatccttgaagcgcaaagcgtgaaagataagccgtcgctgattatctgccgtacggtgattggctttggttcgccgaataaagcaggtaaggaagaggcgcacggcgcaccactgggggaagaagaagtggcgctggcacggcaaaaactgggctggcaccatccgccatttgagatccctaaagagatttatcacgcctgggatgcccgtgaaaaaggcgaaaaagcgcagcagagctggaatgagaagtttgccgcctataaaaaggctcatccgcaactggcagaagagtttacccgacggatgagcggtggtttaccgaaggactgggagaaaacgactcagaaatatatcaatgagttacaggcaaatccggcgaaaatcgctacccgtaaggcttcgcaaaatacgcttaacgcttacgggccgatgctgcctgagttgctcggcggttcggcggatctggctcccagcaacctgaccatctggaaaggttctgtttcgctgaaggaagatccagcgggcaactacattcactacggggtgcgtgaatttggcatgaccgctatcgccaacggcatcgcgcaccacggcggctttgtgccgtataccgcgacgttcctgatgtttgttgaatacgcccgtaacgccgcgcggatggcggcactgatgaaagcgcggcagattatggtttatacccacgactcaattggcctgggcgaagatggtccgacgcaccaggctgttgagcaactggccagcctgcgcttaacgccaaatttcagcacctggcgaccgtgcgatcaggtggaagcggcggtgggctggaagctggcggttgagcgccacaacggaccgacggcactgatcctctcaaggcagaatctggcccaggtggaacgtacgccggatcaggttaaagagattgctcgtggcggttatgtgctgaaagacagcggcggtaagccagatattattctgattgccaccggttcagagatggaaattaccctgcaagcggcagagaaattagcaggagaaggtcgcaatgtacgcgtagtttccctgccctcgaccgatattttcgacgcccaggatgaggaatatcgggagtcggtgttgccttctaacgttgcggctcgcgtggcggtggaagcaggtattgccgattactggtacaagtatgttggtctgaaaggggcaattgtcgggatgacgggttacggggaatctgctccggcggataagctgttcccgttctttggctttaccgccgagaatattgtggcaaaagcgcataaggtgctgggagtgaaaggtgcctga

SEQ ID NO: 150 - protein, 667 aa, Escherichia coli
MSRKDLANAIRALSMDAVQKANSGHPGAPMGMADIAEVLWNDFLKHNPTDPTWYDRDRFILSNGHASMLLYSLLHLTGYDLPLEELKNFRQLHSKTPGHPEIGYTPGVETTTGPLGQGLANAVGLAIAERTLAAQFNQPDHEIVDHFTYVFMGDGCLMEGISHEVCSLAGTLGLGKLIGFYDHNGISIDGETEGWFTDDTAKRFEAYHWHVIHEIDGHDPQAVKEAILEAQSVKDKPSLIICRTVIGFGSPNKAGKEEAHGAPLGEEEVALARQKLGWHHPPFEIPKEIYHAWDAREKGEKAQQSWNEKFAAYKKAHPQLAEEFTRRMSGGLPKDWEKTTQKYINELQANPAKIATRKASQNTLNAYGPMLPELLGGSADLAPSNLTIWKGSVSLKEDPAGNYIHYGVREFGMTAIANGIAHHGGFVPYTATFLMFVEYARNAARMAALMKARQIMVYTHDSIGLGEDGPTHQAVEQLASLRLTPNFSTWRPCDQVEAAVGWKLAVERHNGPTALILSRQNLAQVERTPDQVKEIARGGYVLKDSGGKPDIILIATGSEMEITLQAAEKLAGEGRNVRVVSLPSTDIFDAQDEEYRESVLPSNVAARVAVEAGIADYWYKYVGLKGAIVGMTGYGESAPADKLFPFFGFTAENIVAKAHKVLGVKGA

SEQ ID NO: 151 - DNA, 951 bp, Escherichia coli
atgaacgagttagacggcatcaaacagttcaccactgtcgtggcagacagcggcgatattgagtccattcgccattatcatccccaggatgccaccaccaatccttcgctgttactcaaagctgccggattatcacaatatgagcatttaatagacgatgctatcgcctggggtaaaaaaaatggcaagacccaggaacaacaggtggtcgcagcgtgtgacaaactggcggtcaatttcggtgctgaaatcctcaaaatcgtacccggtcgcgtgtcaacagaagttgatgcacgcctctcttttgataaagaaaagagtattgagaaggcgcgccatctggtggacttgtatcagcaacaaggcgttgagaaatcacgcattctgatcaagctggcttcgacctgggaaggaattcgcgcggcagaagagctggaaaaagaaggtattaactgcaacctgacgctgctgttttcttttgcacaggcacgggcctgtgcggaagcaggcgtttttctgatttcgccgtttgtcgggcgtatttatgactggtatcaggcacgcaagccgatggacccgtatgtggtggaagaagatccgggcgttaaatcggtgcgcaatatctacgactactataagcaacaccactatgaaaccattgtgatgggcgcgagcttccgtcgcaccgaacaaatcctcgccttaaccggctgcgatcgactgactatcgcaccgaatttactgaaggagctgcaggaaaaagtttcgccagtggtacgtaaattaatcccaccttctcagacgttcccacgcccagctcccatgagcgaagcggagttccgttgggagcacaatcaggatgcgatggcggtagaaaaactgtctgaaggcattcgtctgttcgccgttgatcaacgcaaactggaagatcttcttgccgccaaactataa

SEQ ID NO: 152 - protein, 316 aa, Escherichia coli
MNELDGIKQFTTVVADSGDIESIRHYHPQDATTNPSLLLKAAGLSQYEHLIDDAIAWGKKNGKTQEQQVVAACDKLAVNFGAEILKIVPGRVSTEVDARLSFDKEKSIEKARHLVDLYQQQGVEKSRILIKLASTWEGIRAAEELEKEGINCNLTLLFSFAQARACAEAGVFLISPFVGRIYDWYQARKPMDPYVVEEDPGVKSVRNIYDYYKQHHYETIVMGASFRRTEQILALTGCDRLTIAPNLLKELQEKVSPVVRKLIPPSQTFPRPAPMSEAEFRWEHNQDAMAVEKLSEGIRLFAVDQRKLEDLLAAKL

SEQ ID NO: 153 - DNA, 954 bp, Escherichia coli
atgacggacaaattgacctcccttcgtcagtacaccaccgtagtggccgacactggggacatcgcggcaatgaagctgtatcaaccgcaggatgccacaaccaacccttctctcattcttaacgcagcgcagattccggaataccgtaagttgattgatgatgctgtcgcctgggcgaaacagcagagcaacgatcgcgcgcagcagatcgtggacgcgaccgacaaactggcagtaaatattggtctggaaatcctgaaactggttccgggccgtatctcaactgaagttgatgcgcgtctttcctatgacaccgaagcgtcaattgcgaaagcaaaacgcctgatcaaactctacaacgatgctggtattagcaacgatcgtattctgatcaaactggcttctacctggcagggtatccgtgctgcagaacagctggaaaaagaaggcatcaactgtaacctgaccctgctgttctccttcgctcaggctcgtgcttgtgcggaagcgggcgtgttcctgatctcgccgtttgttggccgtattcttgactggtacaaagcgaataccgataagaaagagtacgctccggcagaagatccgggcgtggtttctgtatctgaaatctaccagtactacaaagagcacggttatgaaaccgtggttatgggcgcaagcttccgtaacatcggcgaaattctggaactggcaggctgcgaccgtctgaccatcgcaccggcactgctgaaagagctggcggagagcgaaggggctatcgaacgtaaactgtcttacaccggcgaagtgaaagcgcgtccggcgcgtatcactgagtccgagttcctgtggcagcacaaccaggatccaatggcagtagataaactggcggaaggtatccgtaagtttgctattgaccaggaaaaactggaaaaaatgatcggcgatctgctgtaa

SEQ ID NO: 154 - protein, 317 aa, Escherichia coli
MTDKLTSLRQYTTVVADTGDIAAMKLYQPQDATTNPSLILNAAQIPEYRKLIDDAVAWAKQQSNDRAQQIVDATDKLAVNIGLEILKLVPGRISTEVDARLSYDTEASIAKAKRLIKLYNDAGISNDRILIKLASTWQGIRAAEQLEKEGINCNLTLLFSFAQARACAEAGVFLISPFVGRILDWYKANTDKKEYAPAEDPGVVSVSEIYQYYKEHGYETVVMGASFRNIGEILELAGCDRLTIAPALLKELAESEGAIERKLSYTGEVKARPARITESEFLWQHNQDPMAVDKLAEGIRKFAIDQEKLEKMIGDLL

SEQ ID NO: 155 - DNA, 954 bp, Escherichia coli; identical to SEQ ID NO: 153

SEQ ID NO: 156 - protein, 317 aa, Escherichia coli; identical to SEQ ID NO: 154

SEQ ID NO: 157 - DNA, 678 bp, Escherichia coli
atgaaacagtatttgattgccccctcaattctgtcggctgattttgcccgcctgggtgaagataccgcaaaagccctggcagctggcgctgatgtcgtgcattttgacgtcatggataaccactatgttcccaatctgacgattgggccaatggtgctgaaatccttgcgtaactatggcattaccgcccctatcgacgtacacctgatggtgaaacccgtcgatcgcattgtgcctgatttcgctgccgctggtgccagcatcattacctttcatccagaagcctccgagcatgttgaccgcacgctgcaactgattaaagaaaatggctgtaaagcgggtctggtatttaacccggcgacacctctgagctatctggattacgtgatggataagctggatgtgatcctgctgatgtccgtcaaccctggtttcggcggtcagtctttcattcctcaaacactggataaactgcgcgaagtacgtcgccgtatcgacgagtctggctttgacattcgactagaagtggacggtggcgtgaaggtgaacaacattggcgaaatcgctgcggcgggcgcggatatgttcgtcgccggttcggcaatcttcgaccagccagactacaaaaaagtcattgatgaaatgcgcagtgaactggcaaaggtaagtcatgaataa

SEQ ID NO: 158 - protein, 225 aa, Escherichia coli
MKQYLIAPSILSADFARLGEDTAKALAAGADVVHFDVMDNHYVPNLTIGPMVLKSLRNYGITAPIDVHLMVKPVDRIVPDFAAAGASIITFHPEASEHVDRTLQLIKENGCKAGLVFNPATPLSYLDYVMDKLDVILLMSVNPGFGGQSFIPQTLDKLREVRRRIDESGFDIRLEVDGGVKVNNIGEIAAAGADMFVAGSAIFDQPDYKKVIDEMRSELAKVSHE

SEQ ID NO: 159 - DNA, 1416 bp, Escherichia coli
gtgaaacaaagcactattgcactggcactcttaccgttactgtttacccctgtgacaaaagcccggacaccagaaatgcctgttctggaaaaccgggctgctcagggcgatattactgcacccggcggtgctcgccgtttaacgggtgatcagactgccgctctgcgtgattctcttagcgataaacctgcaaaaaatattattttgctgattggcgatgggatgggggactcggaaattactgccgcacgtaattatgccgaaggtgcgggcggcttttttaaaggtatagatgccttaccgcttaccgggcaatacactcactatgcgctgaataaaaaaaccggcaaaccggactacgtcaccgactcggctgcatcagcaaccgcctggtcaaccggtgtcaaaacctataacggcgcgctgggcgtcgatattcacgaaaaagatcacccaacgattctggaaatggcaaaagccgcaggtctggcgaccggtaacgtttctaccgcagagttgcaggatgccacgcccgctgcgctggtggcacatgtgacctcgcgcaaatgctacggtccgagcgcgaccagtgaaaaatgtccgggtaacgctctggaaaaaggcggaaaaggatcgattaccgaacagctgcttaacgctcgtgccgacgttacgcttggcggcggcgcaaaaacctttgctgaaacggcaaccgctggtgaatggcagggaaaaacgctgcgtgaacaggcacaggcgcgtggttatcagttggtgagcgatgctgcctcactgaattcggtgacggaagcgaatcagcaaaaacccctgcttggcctgtttgctgacggcaatatgccagtgcgctggctaggaccgaaagcaacgtaccatggcaatatcgataagcccgcagtcacctgtacgccaaatccgcaacgtaatgacagtgtaccaaccctggcgcagatgaccgacaaagccattgaattgttgagtaaaaatgagaaaggctttttcctgcaagttgaaggtgcgtcaatcgataaacaggatcatgctgcgaatccttgtgggcaaattggcgagacggtcgatctcgatgaagccgtacaacgggcgctggaattcgctaaaaaggagggtaacacgctggtcatagtcaccgctgatcacgcccacgccagccagattgttgcgccggataccaaagctccgggcctcacccaggcgctaaataccaaagatggcgcagtgatggtgatgagttacgggaactccgaagaggattcacaagaacataccggcagtcagttgcgtattgcggcgtatggcccgcatgccgccaatgttgttggactgaccgaccagaccgatctcttctacaccatgaaagccgctctggggctgaaataa

SEQ ID NO: 160 - protein, 471 aa, Escherichia coli
MKQSTIALALLPLLFTPVTKARTPEMPVLENRAAQGDITAPGGARRLTGDQTAALRDSLSDKPAKNIILLIGDGMGDSEITAARNYAEGAGGFFKGIDALPLTGQYTHYALNKKTGKPDYVTDSAASATAWSTGVKTYNGALGVDIHEKDHPTILEMAKAAGLATGNVSTAELQDATPAALVAHVTSRKCYGPSATSEKCPGNALEKGGKGSITEQLLNARADVTLGGGAKTFAETATAGEWQGKTLREQAQARGYQLVSDAASLNSVTEANQQKPLLGLFADGNMPVRWLGPKATYHGNIDKPAVTCTPNPQRNDSVPTLAQMTDKAIELLSKNEKGFFLQVEGASIDKQDHAANPCGQIGETVDLDEAVQRALEFAKKEGNTLVIVTADHAHASQIVAPDTKAPGLTQALNTKDGAVMVMSYGNSEEDSQEHTGSQLRIAAYGPHAANVVGLTDQTDLFYTMKAALGLK

SEQ ID NO: 161 - DNA, 1858 bp, Arabidopsis thaliana
cacgtggcgaagaatagtccccgaatcttcctctgacgaccatttgatacttttttttcttcagtttgttggttttgtcctcttaacaaaatattcttcaaactctctctgttgtttgtttgttgacaaatctctcaaaaccatttgttttgcaatcgcagatccgtttttcttcgggtctcatcacaatgaatggcttctctgatcttaatccttctgagaggtacgctttgtctgatcatcaatgatgcttataataatctcatttatacatgatcttgcctctatatatttgttcatcttagtaatcttcggtctcagcttccattttcgtctcccactatgtttctaggattttgtgttacttttgttagaaaactgcgatttttgtgctagtgtttgtttctccaagatcaatggaactcgttgcctaaaattcctgattatagttacataaacatcaaatggttctaattggtctttgatcttaaacccatttgattatggtatctaaagtttgatccttttgatgcactctcatcgcagtttctcgtgattttaatattattgaactcttttgatttgtggtgaagcaaaccttctctgtcacaactagctccattagaagccattctgtttgatgttgatggaacactctgtgactcagatcccatccaccttattgccttccaagaactgcttcaagaggttccttgctttttttaatgtcattataacttccaaatttacaacaagactttagaaaactgtgaataatatgctatggaaccttgctattactcagtttcaagctctcgtgtcaatcaattttgtttctttctatcattcgcagattggttttaacaatggtgtcccaatcgatgagaaattctttgttgagaacattgctggaaaacacaattctgaaattgctctacttctgttccctgatgatgtttcaagagggttaaaattctgtgatgaaaaggaagctctttaccgcaagtaagctatttttctgtgtttcctccattcttttaatgtcacaaactcttttcaggtctgagttcatttggagtaactttgttttgttcttttttcttgatgattagaattgttgcagagaagataaagccacttgatgggcttataaaactgaccaaatggatcgaagatcgtggattgaaacgagctgcggtaacaaacgctccaaaagaaaacgcagagctcatgatatcgaaacttggtctgactgatttctttcaagcagtgattcttggctctgaatgtgaatttcccaaaccacaccctggaccttacttgaaggctcttgaagtgcttaacgtgtcaaaggagcacacgctagttttcgaagactcgatctctgggataaaagctggagttgcagctggaatgccagtgattggactgactacagggaatccagcaagcctgcttatgcaagcaaaacccgcttttctcatcgagaactatgcggatccaaaactgtgggctgtgttggaagaacttgataacaagtcttaagtctcacttgtttggcttatggaaacccacacatgcatgagcagcctctgaagtttaccttatgtcttagatgatcattgttgaataattcattgggagtttatgacaatgggagctttcaaatatctgattattttgtattgatacatgcacaatgctagatttgtatccaggagatagttgcataaaccaatatactataccctcggatcttagcttattttcattgatatcttgttgttttgtgctgtaaacatatcagcttttgaatacatttggtccatggcgcaaaataagactttttttttttttt

SEQ ID NO: 162 - protein, 244 aa, Arabidopsis thaliana
MNGFSDLNPSESKPSLSQLAPLEAILFDVDGTLCDSDPIHLIAFQELLQEIGFNNGVPIDEKFFVENIAGKHNSEIALLLFPDDVSRGLKFCDEKEALYRKIVAEKIKPLDGLIKLTKWIEDRGLKRAAVTNAPKENAELMISKLGLTDFFQAVILGSECEFPKPHPGPYLKALEVLNVSKEHTLVFEDSISGIKAGVAAGMPVIGLTTGNPASLLMQAKPAFLIENYADPKLWAVLEELDNKS

SEQ ID NO: 163 - DNA, 819 bp, Bacillus subtilis
atgcgtattatggccagtcatgatacgcctgtgtcaccggctggcattctgattgacttggacggtactgtattcagaggaaatgagttgatcgaaggagcaagagaagcgatcaaaacgcttaggagaatgggaaagaaaatcgtctttttaagcaaccgggggaatatctcccgtgccatgtgcagaaaaaaacttcttggcgcggggattgaaacggacgtaaacgacattgttctgtcatcaagcgtgacagcggcttttctgaaaaaacattatcgtttttcaaaggtatgggtgcttggggagcaaggcttggttgacgagctgaggctggccggtgtgcagaacgcgagcgaaccgaaggaagcggattggctcgtgatctcccttcatgaaacgctcacgtacgacgatttaaatcaagcctttcaagcggctgccggcggcgctcgtattatcgctacaaacaaagaccgctcttttccgaacgaagacggaaatgccattgatgtggccggaatgatcggggcaattgagacttctgcacaagcgaagactgaacttgttgtcggaaaaccgtcatggctgatggcggaggctgcctgtacagcaatggggctgtccgcacatgaatgcatgattataggagacagcattgaatctgacattgcgatggggaagctttatggcatgaaaagcgccttagtgctaactggttctgcgaaacagggtgaacagcgtttgtacacgccggattatgtgctggattctattaaggatgtaaccaaattggctgaggaggggattctgatatga

SEQ ID NO: 164 - protein, 272 aa, Bacillus subtilis
MRIMASHDTPVSPAGILIDLDGTVFRGNELIEGAREAIKTLRRMGKKIVFLSNRGNISRAMCRKKLLGAGIETDVNDIVLSSSVTAAFLKKHYRFSKVWVLGEQGLVDELRLAGVQNASEPKEADWLVISLHETLTYDDLNQAFQAAAGGARIIATNKDRSFPNEDGNAIDVAGMIGAIETSAQAKTELVVGKPSWLMAEAACTAMGLSAHECMIIGDSIESDIAMGKLYGMKSALVLTGSAKQGEQRLYTPDYVLDSIKDVTKLAEEGILI

SEQ ID NO: 165 - DNA, 825 bp, Pseudomonas fluorescens
atgagtgacgcagcgattcatcccatccgttttatcctcagtgacgtggacggcaccttgctgcatcccgatcatagcctcagccaacgcaccgccgacgcggtgcgcgccttgcgcgaagccggagtgttgttcagcctggccagcgggcgcccgcccaaggccatgctgcacctgatcgaaacctttgggatcgatgtgccggtggcgggcttcaatggcggtaccttgatcaacccggatggcagcatcctggttgcccatcatctgccggcggaagcggcgctggttaccctggcgctgttttcagcggagccggaggtggaagtgtgggtgtttgccgatggcgactggctgcgccgtgacccgtcagggccgatggagccgcgcgaggcgaatggcctgggctatgggccggtggtggtggagagtttcgagccctacctggaccgggtcgacaagatcgtcgccgcgagtcacaacacgcaattattggtagagctggaggcgcgattgcaacccaaggtgcaggggctggcccaggtgtcgcgttcgcaaccggtgtacttggacgtgaccgcgatgctggccaacaagggcgaggccttgaagaccttggcggcacacctgggtgtgcccatggagcaaacggcggcgattggcgatggtggcaatgacccggcgatgtttcaggtggccgggttgtcgattgccatggggcaggcggaagaaaccgtcaagcgccaggccagtgtggtgacgggcagcaacatcgaagatggcgccgccgaagcaatcgaacggtttattctcgcggcaccttaa

SEQ ID NO: 166 - protein, 274 aa, Pseudomonas fluorescens
MSDAAIHPIRFILSDVDGTLLHPDHSLSQRTADAVRALREAGVLFSLASGRPPKAMLHLIETFGIDVPVAGFNGGTLINPDGSILVAHHLPAEAALVTLALFSAEPEVEVWVFADGDWLRRDPSGPMEPREANGLGYGPVVVESFEPYLDRVDKIVAASHNTQLLVELEARLQPKVQGLAQVSRSQPVYLDVTAMLANKGEALKTLAAHLGVPMEQTAAIGDGGNDPAMFQVAGLSIAMGQAEETVKRQASVVTGSNIEDGAAEAIERFILAAP

SEQ ID NO: 167 - DNA, 651 bp, Escherichia coli
gtgcggtgcaaaggttttctgtttgatcttgatggaacgctggtggattccctgcctgcggtagaacgggcgtggagcaactgggccagacgtcatgggttagcgccggaagaggtgctggctttcattcacggtaaacaggcgatcacctctctgcgccattttatggcgggcaaatccgaggctgatattgccgccgagtttacgcgtctggagcacatcgaggccacggaaaccgaaggtattaccgcgcttccgggggcaatcgccttactcagtcatttgaataaagcaggtattccgtgggccattgtgacttctggctccatgccggtagcgcgagcgcgccataaaatagctgggcttcccgcaccagaggtgtttgtaaccgctgagcgagtgaagcgcggaaaaccagaacctgatgcgtatctgttaggcgcgcagctgctggggcttgcgccgcaggagtgtgtggtggtggaagatgctcccgctggcgtgctttctggcctggcggcgggttgtcatgtcattgcggttaacgctccggcagataccccgcgcctgaatgaggtcgatttggtcctccacagtctggagcaaattactgtgaccaaacagccaaatggcgatgttattattcagtga

SEQ ID NO: 168 - protein, 216 aa, Escherichia coli
MRCKGFLFDLDGTLVDSLPAVERAWSNWARRHGLAPEEVLAFIHGKQAITSLRHFMAGKSEADIAAEFTRLEHIEATETEGITALPGAIALLSHLNKAGIPWAIVTSGSMPVARARHKIAGLPAPEVFVTAERVKRGKPEPDAYLLGAQLLGLAPQECVVVEDAPAGVLSGLAAGCHVIAVNAPADTPRLNEVDLVLHSLEQITVTKQPNGDVIIQ

SEQ ID NO: 169 - DNA, 816 bp, Escherichia coli
atgagcgtaaaagttatcgtcacagacatggacggtacttttcttaacgacgccaaaacgtacaaccaaccacgttttatggcgcaatatcaggaactgaaaaagcgcggcattaagttcgttgttgccagcggtaatcagtattaccagcttatttcattctttcctgagctaaaggatgagatctcttttgtcgcggaaaacggcgcactggtttacgaacatggcaagcagttgttccacggcgaactgacccgacatgaatcgcggattgttattggcgagttgctaaaagataagcaactcaattttgtcgcctgcggtctgcaaagtgcatatgtcagcgaaaatgcccccgaagcatttgtcgcactgatggcaaaacactaccatcgcctgaaacctgtaaaagattatcaggagattgacgacgtactgttcaagttttcgctcaacctgccggatgaacaaatcccgttagtgatcgacaaactgcacgtagcgctcgatggcattatgaaacccgttaccagtggttttggctttatcgacctgattattcccggtctacataaagcaaacggtatttcgcggttactgaaacgctgggatctgtcaccgcaaaatgtggtagcgattggcgacagcggtaacgatgcggagatgctgaaaatggcgcgttattcctttgcgatgggcaatgctgcggaaaacattaaacaaatcgcccgttacgctaccgatgataataatcatgaaggcgcgctgaatgtgattcaggcggtgctggataacacatccccttttaacagctga

SEQ ID NO: 170 - protein, 271 aa, Escherichia coli
MSVKVIVTDMDGTFLNDAKTYNQPRFMAQYQELKKRGIKFVVASGNQYYQLISFFPELKDEISFVAENGALVYEHGKQLFHGELTRHESRIVIGELLKDKQLNFVACGLQSAYVSENAPEAFVALMAKHYHRLKPVKDYQEIDDVLFKFSLNLPDEQIPLVIDKLHVALDGIMKPVTSGFGFIDLIIPGLHKANGISRLLKRWDLSPQNVVAIGDSGNDAEMLKMARYSFAMGNAAENIKQIARYATDDNNHEGALNVIQAVLDNTSPFNS

SEQ ID NO: 171 - DNA, 813 bp, Escherichia coli
atggctattaaactcattgctatcgatatggatggcacccttctgctgcccgatcacaccatttcacccgccgttaaaaatgcgattgccgcagctcgcgcccgtggcgtgaatgtcgtgctaacgacgggtcgcccgtatgcaggtgtgcacaactacctgaaagagctgcatatggaacagccgggcgactactgcattacttataacggcgcgctggtacagaaggccgctgatggtagcaccgtggcgcaaactgctctcagctatgacgactatcgtttcctggaaaaactctctcgcgaagtcggttctcatttccacgccctggaccgcaccacgctgtacaccgccaaccgtgatatcagctactacacggtgcatgaatccttcgttgccaccattccgctggtgttctgcgaagcggagaaaatggaccccaatacccagttcctgaaagtgatgatgattgatgaacccgccatcctcgaccaggctatcgcgcgtattccgcaggaagtgaaagagaaatataccgtgctgaaaagtgcgccgtacttcctcgaaatcctcgataaacgcgttaacaaaggtacgggggtgaaatcactggccgacgtgttaggtattaaaccggaagaaatcatggcgattggcgatcaggaaaacgatatcgcaatgattgaatatgcaggcgtcggtgtggcgatggataacgctattccttcagtgaaagaagtggcgaactttgtcaccaaatctaaccttgaagatggcgtggcgtttgctattgagaagtatgtgctgaattaa

SEQ ID NO: 172 - protein, 270 aa, Escherichia coli
MAIKLIAIDMDGTLLLPDHTISPAVKNAIAAARARGVNVVLTTGRPYAGVHNYLKELHMEQPGDYCITYNGALVQKAADGSTVAQTALSYDDYRFLEKLSREVGSHFHALDRTTLYTANRDISYYTVHESFVATIPLVFCEAEKMDPNTQFLKVMMIDEPAILDQAIARIPQEVKEKYTVLKSAPYFLEILDKRVNKGTGVKSLADVLGIKPEEIMAIGDQENDIAMIEYAGVGVAMDNAIPSVKEVANFVTKSNLEDGVAFAIEKYVLN

SEQ ID NO: 173 - DNA, 867 bp, Plasmodium falciparum
atgcacgaaattgtagataagaatggtaagaaagttcaaaagaataatttgaatgatgaaataaaaataatctttacggatttagatggaacattgttaaatagtgagaataaggtttcagaacagaatttggagagtttaataagagctcaagaaaaaggcataaaggttgttatagcaacaggtagatctatattttctgtagagaatgttataggagagcatgtaaaaaagaatagaataagtttattaccagggatatatatgaatggatgtgtaacatttgatgaaaaaggttcaagggtgatagataggattatgaacaatgacttgaaaatggagatacatgaattttctaaacaaataaatatatcaaaatatgctatatggttttgtttagaaaaaacatattgttttgaaataaatgattgtatacgtgaatatatggaggttgaagcattaaatcctgatgttattgaagataatatgttagaaggtttgacagtatataaagtattattttcattaccagaaaatatattagaaaatacgttaaaattatgtagagagaaattttctcatcgtattaatgtagctaatacttttcaaagttatgttgaattatttcatcaacatactaataaattcgaaggtgtaaaagaaatttgtaaatattataatataagtctaaacaatgcgctagctatgggagatggagaaaatgatattgaaatgttaagtggtttaacacattcagtgggtgtacataatgcttcagaaaaagtaaaaaattcagctgcttatgttggaccttcgaataatgaacatgctatatctcatgtcttgaagacattctgtgacatataa

SEQ ID NO: 174 - protein, 288 aa, Plasmodium falciparum
MHEIVDKNGKKVQKNNLNDEIKIIFTDLDGTLLNSENKVSEQNLESLIRAQEKGIKVVIATGRSIFSVENVIGEHVKKNRISLLPGIYMNGCVTFDEKGSRVIDRIMNNDLKMEIHEFSKQINISKYAIWFCLEKTYCFEINDCIREYMEVEALNPDVIEDNMLEGLTVYKVLFSLPENILENTLKLCREKFSHRINVANTFQSYVELFHQHTNKFEGVKEICKYYNISLNNALAMGDGENDIEMLSGLTHSVGVHNASEKVKNSAAYVGPSNNEHAISHVLKTFCDI

SEQ ID NO: 175 - DNA, 1059 bp, Enterococcus avium
atgagtaaaacaatgaagggtgtttccaagcaggcacccggttatgaccaaatggcatttatcgatttatctgttccagaagcaacagatgacaaggtcttgattaaagtcgcttatacaggtatttgcggatcagatatccatacgtttaaaggtgaatacaaaaatcccactactcccgtcgtcctaggacatgaattttctgggcaggtagttgaagtcggagccaatgtaccaaaggtcaaggttggtgatcgggtaaccagtgagacgaccttttatgtctgcggcgaatgcgattattgcaaggaaaagcagtataatttgtgtccccatcgaaaaggaatcggcacgcagcaaaatggctccatggcgaactatgtgttggctcgagaagaaagcattcatttactgccggatcatttaagctatgaaggtgcggcgatgagcgaaccattagcgtgctgtgtccacgcgatgtatcaaaagagtcacttggaattaaaagacacgatcattatcatgggccctggaccaatcggactgtatcttttgcagattgccaaggaaattggagccttcgtcattatgacggggatcacaaaagatgctcatcgcttagcattagcaaaaaaactaggcgcggatgtgatcgttgatacgatgaaggaagatctagcgaaagtcgtcaatgagatcacggatggctacggtgtcgataaagtgtatgatgcctcaggagcagttcctgctgttaatgctagtctgccattgattcgcaagcaggggcaatttattcaagtaggcttgttcgctaataaaatggtggatttagacactgaatcgatcattcaacgagagatcgaatacatcggcagtcgttcacagaacccttatgactggccgattgcgatccacttattagcgaaaggtgcgatcaatatcgatgagatgattacgaaaaaatacccgttgactgaatggcgggaagcctttgataaagtgatggaaggcaatgaaatcaaggtaatgatcgaatccaatccagaagaattttaa

SEQ ID NO: 176 - protein, 352 aa, Enterococcus avium
MSKTMKGVSKQAPGYDQMAFIDLSVPEATDDKVLIKVAYTGICGSDIHTFKGEYKNPTTPVVLGHEFSGQVVEVGANVPKVKVGDRVTSETTFYVCGECDYCKEKQYNLCPHRKGIGTQQNGSMANYVLAREESIHLLPDHLSYEGAAMSEPLACCVHAMYQKSHLELKDTIIIMGPGPIGLYLLQIAKEIGAFVIMTGITKDAHRLALAKKLGADVIVDTMKEDLAKVVNEITDGYGVDKVYDASGAVPAVNASLPLIRKQGQFIQVGLFANKMVDLDTESIIQREIEYIGSRSQNPYDWPIAIHLLAKGAINIDEMITKKYPLTEWREAFDKVMEGNEIKVMIESNPEEF

SEQ ID NO: 177 - DNA, 846 bp, Candida albicans
atggattccgcatactggtcatacgataacatagtcccaagcttccgtttggatggaaaactagtcatattaaccggtggctctggtggtttggctgccgtggtatcaagagctttattagccaaaggtgccgatgttgcattagtcgatatgaacttggaaagaacacaacaagctgctagagacgtcttacaatggggcgaagagcaaatgaaaggtaaatacgaatcaccaatcggtcaggtgagtgcttggtcatgtaatattggcgatgctgaagctgtcgacttgacattcaaagccatcaacgaacaccacggcaaaatctcaagtgtcttggtcaacactgccggttacgctgaaaacttcccagctgaagagtacccagccaagaacgctgaaaaccttatgaaagttaacgggttggggtcattctacgtttcccaagcttttgctagaccattaatccaaaacaacatgaccggatcgatcattttgatcgggtcaatgtccggtaccatcgtcaacgacccacaaccacaatgcatgtacaacatgtccaaagccggtgtcattcatttagccagatcattggcctgtgaatgggctaaatacaatatcagagtcaacacattgtcgccagggtacatcttaaccccattgacaagaaacgttattagtggacacaccgaaatgaagacagaatgggaatcaaagatcccaatgaagagaatggcagaaccaaaagagtttgttggttctatcttatacttggcctcagaatctgcttcatcatacactactggtcacaacttggtcgttgacgggggttacgagtgctggtaa

SEQ ID NO: 178 - protein, 281 aa, Candida albicans
MDSAYWSYDNIVPSFRLDGKLVILTGGSGGLAAVVSRALLAKGADVALVDMNLERTQQAARDVLQWGEEQMKGKYESPIGQVSAWSCNIGDAEAVDLTFKAINEHHGKISSVLVNTAGYAENFPAEEYPAKNAENLMKVNGLGSFYVSQAFARPLIQNNMTGSIILIGSMSGTIVNDPQPQCMYNMSKAGVIHLARSLACEWAKYNIRVNTLSPGYILTPLTRNVISGHTEMKTEWESKIPMKRMAEPKEFVGSILYLASESASSYTTGHNLVVDGGYECW

SEQ ID NO: 179 - DNA, 849 bp, Candida tropicalis
atggactcctcatcatactggtcatacgacaacattgttccaagttttagattggatggaaaattagtaattatcactggtggttctggtggtttgtccgctgttgtttccagagccttgttagcaaaaggtgctgatattgctttgattgatatgaacttggaaagaacccaacaagccgcaagagatgttttacaatggggtgaagaacaaatgaaaggaaaacacgaatctccaattggtcaagtcagtgcttggtcctgtaacattggtgatgctgaagctgttgaattgacattcaaagccatcaacgaacaccacggtaaagttgccagtgttttgattaacacagctggttatgctgaaaatttccctgctgaagaatacccagccaagaatgccgaaaatatcatgaaggtcaatggtttaggatccttttacgtctcacaagctttcgccagacctttgattcaaaataacatgactggctctattatcttgattggttctatgtctggtaccattgtcaacgatccacaaccacaatgtatgtacaacatgtccaaagctggtgtcattcacttggccagatctttagcatgtgaatgggccaaatacaacatcagagtcaataccttgtccccaggttatattttgactccattgacaagaaatgttattagtggtcacactgaaatgaagacagaatgggaatccaagattccaatgaagagaatggccgagccaaaagaatttgtcggttctattttgtacttggcttctgattctgcctcttcctacactactggtcacaatttggtagtggatggtggttacgaatgttggtaa

SEQ ID NO: 180 - protein, 282 aa, Candida tropicalis
MDSSSYWSYDNIVPSFRLDGKLVIITGGSGGLSAVVSRALLAKGADIALIDMNLERTQQAARDVLQWGEEQMKGKHESPIGQVSAWSCNIGDAEAVELTFKAINEHHGKVASVLINTAGYAENFPAEEYPAKNAENIMKVNGLGSFYVSQAFARPLIQNNMTGSIILIGSMSGTIVNDPQPQCMYNMSKAGVIHLARSLACEWAKYNIRVNTLSPGYILTPLTRNVISGHTEMKTEWESKIPMKRMAEPKEFVGSILYLASDSASSYTTGHNLVVDGGYECW

SEQ ID NO: 181 - DNA, 1158 bp, Unknown
  Scheffersomyces stipitis Sequence
aatttctatagattggtacaaatcatagaatagagaatcccaatagcacaagctcctgatttccttgcattatttgcccgcgctcaagtattttttagactgagtcttccatacttcgtactgatataaacaaatattgcacaaactactactagtgaattactaatagtttccaccaaatacagccactacacactacatatactacaatggactactcatacgctaacgttgttcccaacttcagattggacggaagattggctattattaccggaggttctggtggtttggccgcagtcatttcgcgtgccttgttggcccagggcgctgatgttgctctcattgacatgaacttggaaagaaccaagtccgctgccaaagaagttttgggctggggtgaagagacgttgaagggtgaacacgcttcagccatcggccaagtttccgcctggtcctgcaacattggggatgctgaggcagtagacgctactttcagctccatcaacgaacaccacggcaagatcgctgacttgttgattaacaccgctggatactgtgaaaacttccctgccgaaacgtacccggctactaacgctgaaagcatcatgaaggtgaacggtttgggctcattctacgtttcgcaatcgttcgctagaccattgatccagaacaacttgagaggctctatcatcttgattggctcaatgtctggaacaattgtcaacgacccacaaccccaatgtatgtacaacatgtccaaggctggagtgatccacttggtcagatcgttggcctgcgaatgggccaagtacaacatcagagtcaacaccttatcaccaggctatattttgactcctttaaccagaaacgtgatttctggccacacagagatgaaggaagcctgggaatccaagatccccatgaagagaatggccgaacccaaggaattcgtggggtccatcttatacttggcaagcgagactgcttcttcctacactacgggccacaatttggttgtggacggaggatatgaatgctggtagataccgctcccattttaatgaaacgaccacgatacgacccacagtttaatttcacaagtataaagtttatatgtcgctactgttttatagagaaagccaaaattgacgaaac

SEQ ID NO: 182 - protein, 278 aa, Unknown
  Scheffersomyces stipitis Sequence
MDYSYANVVPNFRLDGRLAIITGGSGGLAAVISRALLAQGADVALIDMNLERTKSAAKEVLGWGEETLKGEHASAIGQVSAWSCNIGDAEAVDATFSSINEHHGKIADLLINTAGYCENFPAETYPATNAESIMKVNGLGSFYVSQSFARPLIQNNLRGSIILIGSMSGTIVNDPQPQCMYNMSKAGVIHLVRSLACEWAKYNIRVNTLSPGYILTPLTRNVISGHTEMKEAWESKIPMKRMAEPKEFVGSILYLASETASSYTTGHNLVVDGGYECW

SEQ ID NO: 183 - DNA, 1482 bp, Pseudomonas fluorescens
atgaaactgaataagcagaacctcacccagctggcgcccgaagtgaaattgccagcctatacgcttgccgacacacgccagggcatcgcccatatcggcgtcggcggcttccatcgcgcgcaccaggcgtattacaccgatgcgctgatgaataccggcgagggcctggactggagcatctgcggcgttggcctgcgcagcgaggaccgcaaggcccgcgatgacctggccggccaggactacctgttcaccctgtacgaactgggcgacaccgacgacaccgaagtgcgcgtgatcggctcgatcagcgacatgctgctggccgaagacagcgcccaggcattgatcgataaactggccagccccgagattcgcatcgtctcgctgaccatcaccgaaggcggctactgcatcgacgacagcaacggcgaattcatggcccacttgccgcagatccagcacgacctggctcatccgtcgtcgccaaaaaccgtgttcggctttatctgcgcggcattgacccagcgccgcgcggccggcatcccggcgtttaccgtgatgtcctgcgataacctgccccacaatggcgctgtcacgcgcaaggcactgctggcgttcgccgccctgcacaacgccgagctgcatgactggatcaaggcccatgtgagcttcccgaacgccatggtcgaccgcatcacgccgatgaccagcaccgcccaccgcctgcaactgcacgatgaacacggcatcgacgatgcctggccagttgtttgcgaaccctttgtgcagtgggtactggaagacaaattcgtcaacggccgcccggcgtgggaaaaggttggcgtgcagttcaccgacgatgtgacaccctatgaagagatgaagatcggcttgctcaacggcagccacctggccctgacctacctgggttttctcaagggctatcggtttgtgcacgagaccatgaacgacccgctgttcgtggcctacatgcgcgcctacatggacctcgacgtcacgccaaacctcgcgccggtaccgggcatcgacctgaccgactacaagcagaccctggtggaccgcttctccaaccaggcgattgccgaccagttggaacgggtgtgttcggatggctcgtcgaagtttcccaagttcaccgtgccgaccatcaaccgcctgattgccgacggccgtgagaccgagcgtgcagcactggtcgtcgcggcctgggccttgtatttgaagggtgtggatgagaatggcgtgagctacacaatccccgatccgcgcgccgagttctgccaggggctggtgagtgacgatgcactgatcagccagcggttgctggcagtggaagagattttcggtacggctattcccaactcgcctgagtttgtggcagcgttcgagcggtgctatgggagcctgcgtgataacggcgtcaccactaccctgaagcacctcctgaagaaaccggtttaa

SEQ ID NO: 184 - protein, 493 aa, Pseudomonas fluorescens
MKLNKQNLTQLAPEVKLPAYTLADTRQGIAHIGVGGFHRAHQAYYTDALMNTGEGLDWSICGVGLRSEDRKARDDLAGQDYLFTLYELGDTDDTEVRVIGSISDMLLAEDSAQALIDKLASPEIRIVSLTITEGGYCIDDSNGEFMAHLPQIQHDLAHPSSPKTVFGFICAALTQRRAAGIPAFTVMSCDNLPHNGAVTRKALLAFAALHNAELHDWIKAHVSFPNAMVDRITPMTSTAHRLQLHDEHGIDDAWPVVCEPFVQWVLEDKFVNGRPAWEKVGVQFTDDVTPYEEMKIGLLNGSHLALTYLGFLKGYRFVHETMNDPLFVAYMRAYMDLDVTPNLAPVPGIDLTDYKQTLVDRFSNQAIADQLERVCSDGSSKFPKFTVPTINRLIADGRETERAALVVAAWALYLKGVDENGVSYTIPDPRAEFCQGLVSDDALISQRLLAVEEIFGTAIPNSPEFVAAFERCYGSLRDNGVTTTLKHLLKKPV

SEQ ID NO: 185 - DNA, 1368 bp, Klebsiella pneumoniae
ttagttaatcagcgtgtaaacggcggcgactttctcgcgcatcagcgccaggaaatccgcgttgttggcgagatcaccaaacagggctttatcacgggcgaagacagccaccggatcctgagcctcgaacatctcatgcaccgcctgcgcatccaggatgccgtcctggtactgatatggcagagttcccttgtgccactgctccataaagacgaagaacagcgccggcagcatggcggtcgcttccgggcggacgccgcgctggtagcactcctgcaaggttggcgcgatcatcgccggaattttcgagaagccgtcggcggcgacgcgctggttggtgtcctggatataggggttggtaaagcgcttaagcaccacatcccggtaggtcggcagatcaatgccgttgtcgccgagacacggaataacgtcctccgtaacgtagcggtcggcaatggcgtagataacatcggtcagcgtgctttcatgaatatactgctggccgattaaggttcccgcccaggcaatgcagctgtgcgacgcgttcaaaatacggattttcgcctcttcatacgggatgaccgactccaccatctccacgccgactgcctccagattcgggcggacatcgcggaagttgttctccactacccactggataaaggtctcccccatcaccggcgctttgtcatcaattccggcttgcgctttgatgcgggccggcagatcggccgccggacgcggggtgatgcggtccaccatggtgttcggacaggtggtattggccgccatccagtcaatcaccgcctgtttgccggtgagctgcaggaactcgaccataccgtcgtggaaacgctcgccgttatggcgcacgttatcgcagttgagcagggtcagcggcccggcgttgtcggccatgcgcttttccaggatccgcgcgagggtgccgtaaatggttttgcactcgccttgcaggtcggcctgcagatcggggttgctggtttccagccgatggcgagtgttcaggtagtaccccccttccgtcacggtaaaggcgataactttggtctgcgggtttgccccttcgttaatcagcggctgtagcccggcctgccacggtagcagtttctggattgaggtgatctcttcatattcgcgctccccttccgggctgacggtctcgaggacgtaacgtcctccctgcgccgccagcgcctggaccacctgctcggcgtcgttgcgaatattccccgccgcgatgcgccagcgattatccccggaagcaatcagacgatgcagataccacgcctgatgcgcgcgatgaaaagaacccagaccgatatgaagccatgtgaattgattgttcat

SEQ ID NO: 186 - protein, 455 aa, Klebsiella pneumoniae
MNNQFTWLHIGLGSFHRAHQAWYLHRLIASGDNRWRIAAGNIRNDAEQVVQALAAQGGRYVLETVSPEGEREYEEITSIQKLLPWQAGLQPLINEGANPQTKVIAFTVTEGGYYLNTRHRLETSNPDLQADLQGECKTIYGTLARILEKRMADNAGPLTLLNCDNVRHNGERFHDGMVEFLQLTGKQAVIDWMAANTTCPNTMVDRITPRPAADLPARIKAQAGIDDKAPVMGETFIQWVVENNFRDVRPNLEAVGVEMVESVIPYEEAKIRILNASHSCIAWAGTLIGQQYIHESTLTDVIYAIADRYVTEDVIPCLGDNGIDLPTYRDVVLKRFTNPYIQDTNQRVAADGFSKIPAMIAPTLQECYQRGVRPEATAMLPALFFVFMEQWHKGTLPYQYQDGILDAQAVHEMFEAQDPVAVFARDKALFGDLANNADFLALMREKVAAVYTLIN

SEQ ID NO: 187 - DNA, 1398 bp, Ralstonia solanacearum
atgacgcggtcgtccctcgcgcgtgcgccagtgctgctgcatattggcgccggatctttccatcgtgcgcaccaggcgtggtatctgcatcgcgtcaacgcggccgtgcctcccggcgagcgctggacgctgacggtcgggaacattcgcgacgacatgcacgcgacactcgccgcgctggccgcgcagcagggtgcctacacgctcgagaccgtcacgccgcaaggcgagcgtgcgtatgagacgatccgctcgatcgcgcgggtgctgccctggtccgccgatcttgccgcgctcatcaatacgggcgccgatcccgcgtgccggatcgtgtcgtttacggtcaccgaaggcgggtattacctcgacgagcacgatcgtctcgatgtcacgcatcccgatctcgcggccgacctgcggggcgcccgctcgacgctatacggcgcattggccgcgttgctcgccgagcgccgccagcgcggagccgggccgctcacgctgcagagttgcgacaatctgcgcagcaacggcgcgcgttttcgcgcgggcatgcgcgcgttcctcgcgctgcgcggcgacgcagcgctcctcgcgtggttcgatgccaacgtatcgtgcccgagcgcgatggtcgaccggatcacgccgcggccgaccgacgacgtccgcacgcgcgtgcacgcggccaccggcgtcgacgaccgctgcccggtcatgggcgaatccttcatccaatgggtgatcgaggacaacttcatcgccggccggccggcatgggagatcgcgggcgcggagatcgtcgccgatgtgcatccgtacgaagaggcgaagatccggatcctgaatgcgacgcacagctgcatcgcctgggcgggcacgctcgcgggactcacctacattcacgaagggatgcgtgatgcggccatttatcgcttcgcctacgactacgtcaccgacgacgtgattccctgcctgacgccgagcccgctggatctcgagcgctatcgggacgtcgtgctcgagcgcttcggcaatccgtacgtgctcgacaccaaccagcgtgtcgccgccgatggcttctcgaaaatccccggcttcatcgcaccgacgctcgccgaatgctttgcgcgcggcgccgatccggtcgcgaccgcggtgttgccggcgctgtttctgggcttccttgaaggttgggcgcgcggcaccttgccctacgtataccaggacggcgtgatggatggcgccgccgcacgcagcatcgtcgaggctccggattccgttgccgcgttctgttcagatcgccaattgtggggttcgcttgcgggccgcgacgcgcttgtccaggcggtgcgtgcgggacgcgcgcgcgttgaagcatggcgagccgcacgccgctga

SEQ ID NO: 188 - protein, 465 aa, Ralstonia solanacearum
MTRSSLARAPVLLHIGAGSFHRAHQAWYLHRVNAAVPPGERWTLTVGNIRDDMHATLAALAAQQGAYTLETVTPQGERAYETIRSIARVLPWSADLAALINTGADPACRIVSFTVTEGGYYLDEHDRLDVTHPDLAADLRGARSTLYGALAALLAERRQRGAGPLTLQSCDNLRSNGARFRAGMRAFLALRGDAALLAWFDANVSCPSAMVDRITPRPTDDVRTRVHAATGVDDRCPVMGESFIQWVIEDNFIAGRPAWEIAGAEIVADVHPYEEAKIRILNATHSCIAWAGTLAGLTYIHEGMRDAAIYRFAYDYVTDDVIPCLTPSPLDLERYRDVVLERFGNPYVLDTNQRVAADGFSKIPGFIAPTLAECFARGADPVATAVLPALFLGFLEGWARGTLPYVYQDGVMDGAAARSIVEAPDSVAAFCSDRQLWGSLAGRDALVQAVRAGRARVEAWRAARR

SEQ ID NO: 189 - DNA, 1185 bp, Bacillus subtilis
atgaatcgtatcgcagctgacgttcagcgtgcttttgaaaacgccggagaaaagacgttgcctataaaagttgaagaaattgttctcggtaagcaagcagctgattcgcttttggattatgtaaaacgaaaaaacaatcaacatattgtccttgtctgcgacgcgaatacacaccgcattgcaggaattgatttagaaaaccgactgaatcaagaaggatttcaggccgagtgcctgatcattccagaaaatgaagccggagatgtgacagctgatgaacgatcgctcattcatgtgctgatccatacgaaacaaccaacggatgtcatgatcgcagtcggttcgggcacgattcatgatatcgtccgctttgcggcgtttcaaagagatttgccgtttatttcttatccgactgctccatctgtagacggttttacatcagccggtgcgccgattattttatacggcacgaaaacaaccattcaaacgaaggccccatctgcgctgttcgctgatctggatctattaaaagcggcaccgcagtcaatggtggcggctggctttggtgacatgctcggtaaaatcacgtctttagcagattgggaaatatcccggcatcttgccggtgagccttattcgcctgcaggagctaagatcgttcaggaggcgcttgctgcctgcattgaacacacagaagacattgcgatgaaaacggaaactggcatacgggttttgatggagtctttacttgtatcggggcttgtcatgctggcattagatcattcccgaccggcatcaggcggcgagcatcatatttcacattggattgaaatggagttaatggagaaaaaacggcctcagattcttcatggggcaaaggtgggctgtgccgctgttttattaactgacacatacagaaagctcgctcaggatgacgggctgaacgaattttcaccaagccgccgggaagccatccaatcggcttatcaaacactcccgagaggagaagtgctggctgattggctgagatcagccggaggccctgcgtattttgacgaaatcggtgtcgggcaggattccgtcaaaaatgccttcagacacgcgcacaccttaagagaccgatgcaccggattaagaatcatcaatgaaaacaaaacgctgatcaaccatggtctatatgaatag

SEQ ID NO: 190 - protein, 394 aa, Bacillus subtilis
MNRIAADVQRAFENAGEKTLPIKVEEIVLGKQAADSLLDYVKRKNNQHIVLVCDANTHRIAGIDLENRLNQEGFQAECLIIPENEAGDVTADERSLIHVLIHTKQPTDVMIAVGSGTIHDIVRFAAFQRDLPFISYPTAPSVDGFTSAGAPIILYGTKTTIQTKAPSALFADLDLLKAAPQSMVAAGFGDMLGKITSLADWEISRHLAGEPYSPAGAKIVQEALAACIEHTEDIAMKTETGIRVLMESLLVSGLVMLALDHSRPASGGEHHISHWIEMELMEKKRPQILHGAKVGCAAVLLTDTYRKLAQDDGLNEFSPSRREAIQSAYQTLPRGEVLADWLRSAGGPAYFDEIGVGQDSVKNAFRHAHTLRDRCTGLRIINENKTLINHGLYE

SEQ ID NO: 191 - DNA, 1059 bp, Aeropyrum pernix
ttgtatacctcgttccacaggatagacctcccgaggactatagtagtcggcggaggcgttctcgacaaggcgggcggctatgtatctggggtggctcagcgaggcagctatgtgctcgtcgtatccggcccaacggtgtcctcgaaatacttcgagaggcttagagccagcctcgaggccgagggccttacagtcggcctgaagataatcagggacgccacggttgagactgctgaggaggtggcccgtgaggctcttgagagcaggatagaggttgtggcgggcctgggaggtgggaagtcgatagacgttgctaagtacgcttcaaaaagggcgggctcggttttcgtcagcatacccaccgtggctagccacgacgggataacatcgccattctcaagcctgaaggggttcgacaagcctatatcgaggcccgctaaggctccggaggcgataattatagatgtggatgtgatagcggaggctcccaggcgctacaacatcgctggcttcggagacctgataggcaagtatactgcagtcctcgactggaggctggcccacaagctcaggctggaatactatggcgaatacgccgccagtctcgccctcctgagcgccaaacatgtgagccagtacgccgaggagatagcgctgggtacgagggagggctatagagtgctgctggaggctctcgtgagcagcggggtgtcgatgtgtatagccggtagcacgaggcctgcaagcggcagtgaacacctcttcgcccacgccctccacatagtcgctaggaacaagcctctccacggcgaggcggttggggtggggactataatgatggcctacctccacggtaagaactggaggaggataaggggcctgctgaagacggtcggcgcccccactaacgccaaggagcttggtgtcgaggatgatgaggttgttgaggccctcactatagcagccaggatcagaccggagaggtacaccatactaggtgaaaaggggctcacgagagaggcggctgaggcgctggcgcgcaagacgggcgttatatag

SEQ ID NO: 192 - protein, 352 aa, Aeropyrum pernix
MYTSFHRIDLPRTIVVGGGVLDKAGGYVSGVAQRGSYVLVVSGPTVSSKYFERLRASLEAEGLTVGLKIIRDATVETAEEVAREALESRIEVVAGLGGGKSIDVAKYASKRAGSVFVSIPTVASHDGITSPFSSLKGFDKPISRPAKAPEAIIIDVDVIAEAPRRYNIAGFGDLIGKYTAVLDWRLAHKLRLEYYGEYAASLALLSAKHVSQYAEEIALGTREGYRVLLEALVSSGVSMCIAGSTRPASGSEHLFAHALHIVARNKPLHGEAVGVGTIMMAYLHGKNWRRIRGLLKTVGAPTNAKELGVEDDEVVEALTIAARIRPERYTILGEKGLTREAAEALARKTGVI

SEQ ID NO: 193 - DNA, 1020 bp, Escherichia coli
atgaaccaacgtaatgcttcaatgactgtgatcggtgccggctcgtacggcaccgctcttgccatcaccctggcaagaaatggccacgaggttgtcctctggggccatgaccctgaacatatcgcaacgcttgaacgcgaccgctgtaacgccgcgtttctccccgatgtgccttttcccgatacgctccatcttgaaagcgatctcgccactgcgctggcagccagccgtaatattctcgtcgtcgtacccagccatgtctttggtgaagtgctgcgccagattaaaccactgatgcgtcctgatgcgcgtctggtgtgggcgaccaaagggctggaagcggaaaccggacgtctgttacaggacgtggcgcgtgaggccttaggcgatcaaattccgctggcggttatctctggcccaacgtttgcgaaagaactggcggcaggtttaccgacagctatttcgctggcctcgaccgatcagacctttgccgatgatctccagcagctgctgcactgcggcaaaagtttccgcgtttacagcaatccggatttcattggcgtgcagcttggcggcgcggtgaaaaacgttattgccattggtgcggggatgtccgacggtatcggttttggtgcgaatgcgcgtacggcgctgatcacccgtgggctggctgaaatgtcgcgtcttggtgcggcgctgggtgccgaccctgccacctttatgggcatggcggggcttggcgatctggtgcttacctgtaccgacaaccagtcgcgtaaccgccgttttggcatgatgctcggtcagggcatggatgtacaaagcgcgcaggagaagattggtcaggtggtggaaggctaccgcaatacgaaagaagtccgcgaactggcgcatcgcttcggcgttgaaatgccaataaccgaggaaatttatcaagtattatattgcggaaaaaacgcgcgcgaggcagcattgactttactaggtcgtgcacgcaaggacgagcgcagcagccactaa

SEQ ID NO: 194 - protein, 339 aa, Escherichia coli
MNQRNASMTVIGAGSYGTALAITLARNGHEVVLWGHDPEHIATLERDRCNAAFLPDVPFPDTLHLESDLATALAASRNILVVVPSHVFGEVLRQIKPLMRPDARLVWATKGLEAETGRLLQDVAREALGDQIPLAVISGPTFAKELAAGLPTAISLASTDQTFADDLQQLLHCGKSFRVYSNPDFIGVQLGGAVKNVIAIGAGMSDGIGFGANARTALITRGLAEMSRLGAALGADPATFMGMAGLGDLVLTCTDNQSRNRRFGMMLGQGMDVQSAQEKIGQVVEGYRNTKEVRELAHRFGVEMPITEEIYQVLYCGKNAREAALTLLGRARKDERSSH

SEQ ID NO: 195 - DNA, 1176 bp, Saccharomyces cerevisiae
atgtctgctgctgctgatagattaaacttaacttccggccacttgaatgctggtagaaagagaagttcctcttctgtttctttgaaggctgccgaaaagcctttcaaggttactgtgattggatctggtaactggggtactactattgccaaggtggttgccgaaaattgtaagggatacccagaagttttcgctccaatagtacaaatgtgggtgttcgaagaagagatcaatggtgaaaaattgactgaaatcataaatactagacatcaaaacgtgaaatacttgcctggcatcactctacccgacaatttggttgctaatccagacttgattgattcagtcaaggatgtcgacatcatcgttttcaacattccacatcaatttttgccccgtatctgtagccaattgaaaggtcatgttgattcacacgtcagagctatctcctgtctaaagggttttgaagttggtgctaaaggtgtccaattgctatcctcttacatcactgaggaactaggtattcaatgtggtgctctatctggtgctaacattgccaccgaagtcgctcaagaacactggtctgaaacaacagttgcttaccacattccaaaggatttcagaggcgagggcaaggacgtcgaccataaggttctaaaggccttgttccacagaccttacttccacgttagtgtcatcgaagatgttgctggtatctccatctgtggtgctttgaagaacgttgttgccttaggttgtggtttcgtcgaaggtctaggctggggtaacaacgcttctgctgccatccaaagagtcggtttgggtgagatcatcagattcggtcaaatgtttttcccagaatctagagaagaaacatactaccaagagtctgctggtgttgctgatttgatcaccacctgcgctggtggtagaaacgtcaaggttgctaggctaatggctacttctggtaaggacgcctgggaatgtgaaaaggagttgttgaatggccaatccgctcaaggtttaattacctgcaaagaagttcacgaatggttggaaacatgtggctctgtcgaagacttcccattatttgaagccgtataccaaatcgtttacaacaactacccaatgaagaacctgccggacatgattgaagaattagatctacatgaagattag

SEQ ID NO: 196 - protein, 391 aa, Saccharomyces cerevisiae
MSAAADRLNLTSGHLNAGRKRSSSSVSLKAAEKPFKVTVIGSGNWGTTIAKVVAENCKGYPEVFAPIVQMWVFEEEINGEKLTEIINTRHQNVKYLPGITLPDNLVANPDLIDSVKDVDIIVFNIPHQFLPRICSQLKGHVDSHVRAISCLKGFEVGAKGVQLLSSYITEELGIQCGALSGANIATEVAQEHWSETTVAYHIPKDFRGEGKDVDHKVLKALFHRPYFHVSVIEDVAGISICGALKNVVALGCGFVEGLGWGNNASAAIQRVGLGEIIRFGQMFFPESREETYYQESAGVADLITTCAGGRNVKVARLMATSGKDAWECEKELLNGQSAQGLITCKEVHEWLETCGSVEDFPLFEAVYQIVYNNYPMKNLPDMIEELDLHED

SEQ ID NO: 197 - DNA, 1224 bp, Escherichia coli
atgaaacgtgcatttattatggtgctggactcattcggcatcggcgctacagaagatgcagaacgctttggtgacgtcggggctgacaccctgggtcatatcgcagaagcttgtgccaaaggcgaagctgataacggtcgtaaaggcccgctcaatctgccaaatctgacccgtctggggctggcgaaagcacacgaaggttctaccggtttcattccggcgggaatggacggcaacgctgaagttatcggcgcgtacgcatgggcgcacgaaatgtcatccggtaaagataccccgtctggtcactgggaaattgccggtgtcccggttctgtttgagtggggatatttctccgatcacgaaaacagcttcccgcaagagctgctggataaactggtcgaacgcgctaatctgccgggttacctcggtaactgccactcttccggtacggtcattctggatcaactgggcgaagagcacatgaaaaccggcaagccgattttctatacctccgctgactccgtgttccagattgcctgccatgaagaaactttcggtctggataaactctacgaactgtgcgaaatcgcccgtgaagagctgaccaacggcggctacaatatcggtcgtgttatcgctcgtccgtttatcggcgacaaagccggtaacttccagcgtaccggtaaccgtcacgacctggctgttgagccgccagcaccgaccgtgctgcagaaactggttgatgaaaaacacggccaggtggtttctgtcggtaaaattgcggacatctacgccaactgcggtatcaccaaaaaagtgaaagcgactggcctggacgcgctgtttgacgccaccatcaaagagatgaaagaagcgggtgataacaccatcgtcttcaccaacttcgttgacttcgactcttcctggggccaccgtcgcgacgtcgccggttatgccgcgggtctggaactgttcgaccgccgtctgccggagctgatgtctctgctgcgcgatgacgacatcctgatcctcaccgctgaccacggttgcgatccgacctggaccggtactgaccacacgcgtgaacacattccggtactggtatatggcccgaaagtaaaaccgggctcactgggtcatcgtgaaaccttcgcggatatcggccagactctggcaaaatattttggtacttctgatatggaatatggcaaagccatgttctga

SEQ ID NO: 198 - protein, 407 aa, Escherichia coli
MKRAFIMVLDSFGIGATEDAERFGDVGADTLGHIAEACAKGEADNGRKGPLNLPNLTRLGLAKAHEGSTGFIPAGMDGNAEVIGAYAWAHEMSSGKDTPSGHWEIAGVPVLFEWGYFSDHENSFPQELLDKLVERANLPGYLGNCHSSGTVILDQLGEEHMKTGKPIFYTSADSVFQIACHEETFGLDKLYELCEIAREELTNGGYNIGRVIARPFIGDKAGNFQRTGNRHDLAVEPPAPTVLQKLVDEKHGQVVSVGKIADIYANCGITKKVKATGLDALFDATIKEMKEAGDNTIVFTNFVDFDSSWGHRRDVAGYAAGLELFDRRLPELMSLLRDDDILILTADHGCDPTWTGTDHTREHIPVLVYGPKVKPGSLGHRETFADIGQTLAKYFGTSDMEYGKAMF

SEQ ID NO: 199 - DNA, 1641 bp, Escherichia coli
atggcaatccacaatcgtgcaggccaacctgcacaacagagtgatttgattaacgtcgcccaactgacggcgcaatattatgtactgaaaccagaagcagggaatgcggagcacgcggtgaaattcggtacttccggtcaccgtggcagtgcagcgcgccacagctttaacgagccgcacattctggcgatcgctcaggcaattgctgaagaacgtgcgaaaaacggcatcactggcccttgctatgtgggtaaagatactcacgccctgtccgaacctgcattcatttccgttctggaagtgctggcagcgaacggcgttgatgtcattgtgcaggaaaacaatggcttcaccccgacgcctgccgtttccaatgccatcctggttcacaataaaaaaggtggcccgctggcagacggtatcgtgattacaccgtcccataacccgccggaagatggtggaatcaaatacaatccgccaaatggtggcccggctgataccaacgtcactaaagtggtggaagacagggccaacgcactgctggccgatggcctgaaaggcgtgaagcgtatctccctcgacgaagcgatggcatccggtcatgtgaaagagcaggatctggtgcagccgttcgtggaaggtctggccgatatcgttgatatggccgcgattcagaaagcgggcctgacgctgggcgttgatccgctgggcggttccggtatcgaatactggaagcgtattggcgagtattacaacctcaacctgactatcgttaacgatcaggtcgatcaaaccttccgctttatgcaccttgataaagacggcgcgatccgtatggactgctcctccgagtgtgcgatggcgggcctgctggcactgcgtgataagttcgatctggcgtttgctaacgacccggattatgaccgtcacggtatcgtcactccggcaggtttgatgaatccgaaccactacctggcggtggcaatcaattacctgttccagcatcgtccgcagtggggcaaagatgttgccgtcggtaaaacgctggtttcatctgcgatgatcgaccgtgtggtcaacgacttgggccgtaaactggtagaagtcccggtaggtttcaaatggtttgtcgatggtctgttcgacggcagcttcggctttggcggcgaagagagtgcaggggcttccttcctgcgtttcgacggcacgccgtggtccaccgacaaagacggcatcatcatgtgtctgctggcggcggaaatcaccgctgtcaccggtaagaacccgcaggaacactacaacgaactggcaaaacgctttggtgcgccgagctacaaccgtttgcaggcagctgcgacttccgcacaaaaagcggcgctgtctaagctgtctccggaaatggtgagcgccagcaccctggcaggtgacccgatcaccgcgcgcctgactgctgctccgggcaacggtgcttctattggcggtctgaaagtgatgactgacaacggctggttcgccgcgcgtccgtcaggcacggaagacgcatataagatctactgcgaaagcttcctcggtgaagaacatcgcaagcagattgagaaagaagcggttgagattgttagcgaagttctgaaaaacgcgtaa

SEQ ID NO: 200 - protein, 546 aa, Escherichia coli
MAIHNRAGQPAQQSDLINVAQLTAQYYVLKPEAGNAEHAVKFGTSGHRGSAARHSFNEPHILAIAQAIAEERAKNGITGPCYVGKDTHALSEPAFISVLEVLAANGVDVIVQENNGFTPTPAVSNAILVHNKKGGPLADGIVITPSHNPPEDGGIKYNPPNGGPADTNVTKVVEDRANALLADGLKGVKRISLDEAMASGHVKEQDLVQPFVEGLADIVDMAAIQKAGLTLGVDPLGGSGIEYWKRIGEYYNLNLTIVNDQVDQTFRFMHLDKDGAIRMDCSSECAMAGLLALRDKFDLAFANDPDYDRHGIVTPAGLMNPNHYLAVAINYLFQHRPQWGKDVAVGKTLVSSAMIDRVVNDLGRKLVEVPVGFKWFVDGLFDGSFGFGGEESAGASFLRFDGTPWSTDKDGIIMCLLAAEITAVTGKNPQEHYNELAKRFGAPSYNRLQAAATSAQKAALSKLSPEMVSASTLAGDPITARLTAAPGNGASIGGLKVMTDNGWFAARPSGTEDAYKIYCESFLGEEHRKQIEKEAVEIVSEVLKNA

SEQ ID NO: 201 - DNA, 1746 bp, Bacillus subtilis
atgacttggagaaagagctatgaacgctggaaacagacagaacatttagatctggaattaaaagagcgccttattgaattagagggagatgaacaggcccttgaggactgtttctataaagaccttgaattcggtaccggcggaatgcgcggggaaatcggcgccgggacaaatcggatgaatatttacactgtgcgcaaagcatcggccgggtttgcggcatacatctcgaagcaaggtgaggaagcgaaaaaacggggcgttgtcattgcttatgattcccgccataagtctccggagttcgcgatggaagcggcaaaaacacttgcgacacaaggcatccaaacatacgtgtttgatgagcttcgcccgacgccagagctgtcattcgctgttagacagctgaacgcttatggtggaattgtggtaacggcaagccataacccgcctgaatataacggctacaaagtatacggggatgatggcggccagctgcctccaaaggaagcggacatcgtcattgagcaggtaaacgcgattgaaaatgagctgacgatcacagtggacgaagaaaataagttaaaagaaaaaggcttaatcaaaatcatcggtgaagatattgataaagtttatacagaaaaactgacgtccatttctgtacatcctgaattatcggaagaagtagatgtaaaggttgttttcacaccgctgcatggaactgcaaataaaccggtcagacgcggtcttgaagcactcggctacaaaaatgtaacggttgtcaaagaacaggaactgccggattcaaacttctccactgttacatcgccgaacccggaagagcatgcggcattcgaatatgccattaagcttggggaggagcagaatgcagatattctcatcgcgacagatcctgatgctgaccgcctcggcatcgcggtgaaaaacgatcaaggcaaatatacagtgctgacaggaaaccaaaccggagcgttgctgcttcattacctgctttctgaaaagaaaaaacaaggcatcctgcctgataacggtgttgttctcaaaacgatcgtcacaagcgaaatcggccgtgctgtagcttcttcattcggccttgatacgattgatacgctgacaggctttaagtttatcggtgaaaagattaaggaatacgaagcatcaggccagtataccttccaattcggttatgaagagagctacggttatttaatcggggattttgcccgcgataaggacgccattcaggctgcgcttttggcagttgaagtttgcgcgttctataaaaaacagggaatgtcattgtatgaggcgctcatcaatctctttaacgaatatggtttttatcgtgaagggctgaaatccctgacgctgaaaggcaaacaaggagcagagcaaattgaagcgattcttgcttccttcagacaaaatccgccgcagaaaatggcgggcaaacaggttgtcacagcagaagattacgctgtaagcaaacggacgcttctgactgaaagcaaagaagaagccatcgacttgccaaaatcaaatgtattgaaatacttcctggaagacgggtcttggttctgtctccgtccttctggaactgagccgaaggttaaattttatttcgccgtaaaagggtcatctttggaagacagtgaaaagcgacttgccgtcctttctgaagatgtaatgaagacggtggatgaaattgttgagtcaacagcaaaataa

SEQ ID NO: 202 - protein, 581 aa, Bacillus subtilis
MTWRKSYERWKQTEHLDLELKERLIELEGDEQALEDCFYKDLEFGTGGMRGEIGAGTNRMNIYTVRKASAGFAAYISKQGEEAKKRGVVIAYDSRHKSPEFAMEAAKTLATQGIQTYVFDELRPTPELSFAVRQLNAYGGIVVTASHNPPEYNGYKVYGDDGGQLPPKEADIVIEQVNAIENELTITVDEENKLKEKGLIKIIGEDIDKVYTEKLTSISVHPELSEEVDVKVVFTPLHGTANKPVRRGLEALGYKNVTVVKEQELPDSNFSTVTSPNPEEHAAFEYAIKLGEEQNADILIATDPDADRLGIAVKNDQGKYTVLTGNQTGALLLHYLLSEKKKQGILPDNGVVLKTIVTSEIGRAVASSFGLDTIDTLTGFKFIGEKIKEYEASGQYTFQFGYEESYGYLIGDFARDKDAIQAALLAVEVCAFYKKQGMSLYEALINLFNEYGFYREGLKSLTLKGKQGAEQIEAILASFRQNPPQKMAGKQVVTAEDYAVSKRTLLTESKEEAIDLPKSNVLKYFLEDGSWFCLRPSGTEPKVKFYFAVKGSSLEDSEKRLAVLSEDVMKTVDEIVESTAK

SEQ ID NO: 203 - DNA, 666 bp, Lactococcus lactis
atgtttaaagcagtattgtttgatttagatggtgtaattacagataccgcagagtatcattttagagcttggaaagctttggctgaagaaattggcattaatggtgttgaccgccaatttaatgagcaattaaaaggggtctcacgagaagactcgcttcagaaaattctagatttagctgataaaaaagtatcagctgaggaatttaaagaacttgctaagagaaaaaatgataactatgtgaaaatgattcaggatgtgtcgccagccgatgtctatcctggaattttacaattactcaaagatttacgttcaaataaaatcaaaattgctttagcatcggcttctaagaatggtccatttttattagagaaaatgaatttaactggatattttgatgcaattgctgatccggctgaagttgcagcatcaaaaccagcaccagatatttttattgcagcagcacatgcagtgggtgttgccccctctgaatcaattgggttagaggattctcaagctggaattcaagccatcaaagattcaggggctttaccaattggtgtagggcgcccagaagatttgggagatgatatcgtcattgtgcctgatacttcatactatacattagaatttttgaaagaagtttggcttcaaaagcaaaaatga

SEQ ID NO: 204 - protein, 221 aa, Lactococcus lactis
MFKAVLFDLDGVITDTAEYHFRAWKALAEEIGINGVDRQFNEQLKGVSREDSLQKILDLADKKVSAEEFKELAKRKNDNYVKMIQDVSPADVYPGILQLLKDLRSNKIKIALASASKNGPFLLEKMNLTGYFDAIADPAEVAASKPAPDIFIAAAHAVGVAPSESIGLEDSQAGIQAIKDSGALPIGVGRPEDLGDDIVIVPDTSYYTLEFLKEVWLQKQK

SEQ ID NO: 205 - DNA, 660 bp, Escherichia coli
atgaaactgcaaggggtaattttcgatctggatggtgtaatcaccgataccgcgcatctgcatttccaggcgtggcagcagattgccgctgaaattggcatcagcattgatgcgcagtttaacgaatccctaaaagggatcagccgcgatgagtctctgcggcgcattctgcaacacgggggcaaagagggcgactttaactcgcaggagagggcgcaactggcgtatcgcaaaaatctgctctatgtccactcactacgcgagttgacggtcaacgctgttctacccggcattcgctctttgctggcagatctccgtgcacagcagatctcggttgggctggcttctgtctccctgaatgcgccgacgattttagcggcgctggagctgcgcgagtttttcaccttctgcgcggatgcttcccaacttaaaaactcgaaaccggacccggaaatctttctcgccgcctgtgcagggctgggcgtgccgccgcaggcatgtatcggcattgaagatgcgcaggcgggcattgacgccattaacgccagcggtatgcgctcggtggggatcggcgcgggcttaaccggggcgcaattactgttgccttcaacggaatcactcacctggccgcggttatcggccttctggcaaaacgtatag

SEQ ID NO: 206 - protein, 219 aa, Escherichia coli [sequence omitted]

SEQ ID NO: 207 - DNA, 1392 bp, Pseudomonas aeruginosa
atgagcactgtaaaagcaccgacgctgcccgccagcatcttccgcgcctacgacatccgtcgcgtggtaggcgataccctcaccgccgagaccgcctactggatcggtcgcgccatcggctcggaaagcctcgcccgcggcgaaccgtgcgtcgctgtcggccgcgatggccgcctgtccggtcccgagctggtcaagcagctgatccagggcctggtggactgcggttgccaggtcagcgacgtgggcatggtgcctaccccggtgctgtactacgcggccaacgtgctcgagggcaagtccggggtgatgctgaccggcagccacaatccgccggactacaacggcttcaagatcgtggtcgccggcgagaccctggccaacgagcagatccaggccctgcgcgagcgcatcgagaaaaacgacctggcatccggcgtcggcagcgtagagcaggtcgacatcctgccgcgctacttcaagcagatccgcgacgacatcgccatggccaagccgatgaaggtggtggtcgactgcggcaacggcgtggccggggtgatcgccccgcagttgatcgaggccctgggctgcagcgtgatcccgctgtactgcgaggtcgacggcaacttcccgaaccaccatccggacccgggcaagccggagaacctgaaggacctgatcgccaaggtcaaggccgagaacgccgacctgggcctggccttcgacggcgacggcgatcgcgtcggcgtggtcaccaataccggtaccatcatctatccggaccgtctgctgatgctgttcgccaaggacgtggtctcgcgcaacccgggggccgacatcatcttcgacgtcaagtgcacccgccgtctgatcgccctgatcagcggctacggcggccgtccggtgatgtggaagaccggccactcgctgatcaagaagaagatgaaggaaaccggcgccctgctggctggcgagatgagcggccacgtgttcttcaaggagcgctggttcggcttcgacgatggcatctacagcgccgcccgcctgctggaaatcctcagccaggatcagcgtgacagcgagcacgtgttctcggccttcccgagcgacatttccaccccggaaatcaacatcaccgtcaccgaggacagcaagttcgccatcatcgaggcgctgcaacgcgacgcccaatggggcgaaggcaacatcaccaccctcgacggcgtgcgggtcgactaccccaaaggctggggcctggtacgcgcctccaacaccactcccgtgctggtcctgcgcttcgaagcggaccccgaggaagagctggagcgcatcaagaccgtcttccgtaaccaactgaaggcagtggattcctcgctgcccgtgcccttctga

SEQ ID NO: 208 - protein, 463 aa, Pseudomonas aeruginosa
MSTAKAPTLPASIFRAYDIRGVVGDTLTAETAYWIGRAIGSESLARGEPCVAVGRDGRLSGPELVKQLIQGLVDCGCQVSDVGMVPTPVLYYAANVLEGKSGVMLTGSHNPPDYNGFKIVVAGETLANEQIQALRERIEKNDLASGVGSVEQVDILPRYFKQIRDDIAMAKPMKVVVDCGNGVAGVIAPQLIEALGCSVIPLYCEVDGNFPNHHPDPGKPENLKDLIAKVKAENADLGLAFDGDGDRVGVVTNTGTIIYPDRLLMLFAKDVVSRNPGADIIFDVKCTRRLIALISGYGGRPVMWKTGHSLIKKKMKETGALLAGEMSGHVFFKERWFGFDDGIYSAARLLEILSQDQRDSEHVFSAFPSDISTPEINITVTEDSKFAIIEALQRDAQWGEGNITTLDGVRVDYPKGWGLVRASNTTPVLVLRFEADTEEELERIKTVFRNQLKAVDSSLPVPF

SEQ ID NO: 209 - DNA, 1371 bp, Escherichia coli
atgaaaaaattaacctgctttaaagcctatgatattcgcgggaaattaggcgaagaactgaatgaagatatcgcctggcgcattggtcgcgcctatggcgaatttctcaaaccgaaaaccattgtgttaggcggtgatgtccgcctcaccagcgaaaccttaaaactggcgctggcgaaaggtttacaggatgcgggcgttgacgtgctggatattggtatgtccggcaccgaagagatctatttcgccacgttccatctcggcgtggatggcggcattgaagttaccgccagccataatccgatggattataacggcatgaagctggttcgcgagggggctcgcccgatcagcggagataccggactgcgcgacgtccagcgtctggctgaagccaacgactttcctcccgtcgatgaaaccaaacgcggtcgctatcagcaaatcaacctgcgtgacgcttacgttgatcacctgttcggttatatcaatgtcaaaaacctcacgccgctcaagctggtgatcaactccgggaacggcgcagcgggtccggtggtggacgccattgaagcccgctttaaagccctcggcgcgcccgtggaattaatcaaagtgcacaacacgccggacggcaatttccccaacggtattcctaacccactactgccggaatgccgcgacgacacccgcaatgcggtcatcaaacacggcgcggatatgggcattgcttttgatggcgattttgaccgctgtttcctgtttgacgaaaaagggcagtttattgagggctactacattgtcggcctgttggcagaagcattcctcgaaaaaaatcccggcgcgaagatcatccacgatccacgtctctcctggaacaccgttgatgtggtgactgccgcaggtggcacgccggtaatgtcgaaaaccggacacgcctttattaaagaacgtatgcgcaaggaagacgccatctatggtggcgaaatgagcgcccaccattacttccgtgatttcgcttactgcgacagcggcatgatcccgtggctgctggtcgccgaactggtgtgcctgaaagataaaacgctgggcgaactggtacgcgaccggatggcggcgtttccggcaagcggtgagatcaacagcaaactggcgcaacccgttgaggcgattaaccgcgtggaacagcattttagccgtgaggcgctggcggtggatcgcaccgatggcatcagcatgacctttgccgactggcgctttaacctgcgcacctccaataccgaaccggtggtgcgcctgaatgtggaatcgcgcggtgatgtgccgctgatggaagcgcgaacgcgaactctgctgacgttgctgaacgagtaa

SEQ ID NO: 210 - protein, 456 aa, Escherichia coli
MKKLTCFKAYDIRGKLGEELNEDIAWRIGRAYGEFLKPKTIVLGGDVRLTSETLKLALAKGLQDAGVDVLDIGMSGTEEIYFATFHLGVDGGIEVTASHNPMDYNGMKLVREGARPISGDTGLRDVQRLAEANDFPPVDETKRGRYQQINLRDAYVDHLFGYINVKNLTPLKLVINSGNGAAGPVVDAIEARFKALGAPVELIKVHNTPDGNFPNGIPNPLLPECRDDTRNAVIKHGADMGIAFDGDFDRCFLFDEKGQFIEGYYIVGLLAEAFLEKNPGAKIIHDPRLSWNTVDVVTAAGGTPVMSKTGHAFIKERMRKEDAIYGGEMSAHHYFRDFAYCDSGMIPWLLVAELVCLKDKTLGELVRDRMAAFPASGEINSKLAQPVEAINRVEQHFSREALAVDRTDGISMTFADWRFNLRTSNTEPVVRLNVESRGDVPLMEARTRTLLTLLNE

SEQ ID NO: 211 - DNA, 2478 bp, Bifidobacterium dentium
atgacgagtcctgttattggcaccccttggaagaagctgaacgctccggtttccgaggaagctatcgaaggtgtggataagtactggcgtgcagccaactacctctccatcggccagatctatctgcgtagcaacccgctgatgaaggagcccttcacccgcgaagacgtcaagcaccgtctggtcggccactggggcaccaccccgggcctgaacttcctcatcggccacatcaaccgtctcatcgctgatcaccagcagaacaccgtgatcatcatgggcccgggccacggcggcccggctggtaccgctcagtcctacctggacggcacctacaccgagtacttcccgaacatcaccaaggatgaagctggcctgcagaagttcttccgccagttctcctacccgggcggcatcccgtcccactacgctccggagaccccgggctccatccacgaaggtggcgagctgggttacgccctgtcccacgcctatggcgctgtgatgaacaacccgagcctgttcgttccggccatcgtcggcgacggcgaagccgagaccggcccgctggccaccggctggcagtccaacaagctcgtcaacccgcgcaccgacggtatcgtgctgccgatcctgcacctcaatggctacaagatcgccaacccgaccatcctgtcccgcatctccgacgaagagctgcacgagttcttccacggcatgggctatgagccgtatgagttcgtcgccggcttcgacaacgaggatcacctgtcgatccaccgtcgtttcgccgagttgttcgagaccgtcttcgacgagatctgcgacatcaaggccgccgctcagactgacgacatgactcgtccgttctacccgatgatcatcttccgcaccccgaagggctggacctgcccgaagttcatcgacggcaagaagaccgaaggttcctggcgctcccaccaggttccgctggcttccgcccgcgataccgaggctcacttcgaggtcctcaagaactggctcgagtcctacaagccggaagagctgttcgacgccaacggcgccgtgaagccggaagtcaccgccttcatgccgaccggcgaactgcgcatcggtgagaacccgaacgccaacggtggccgcatccgcgaagagctgaacctgccggccctcgaggactacgaggtcaaggaagtcgccgagtacggccacggctggggccagctcgaggccacccgtcgtctgggcgtctacacccgcgacatcatcaagaacaacccggactccttccgtatcttcggaccggacgagaccgcttccaaccgtctgcaggccgcatacgacgtcaccaacaagcagtgggacgccggctacctgtccgctcaggttgatgagcacatggccgtcaccggtcaggtcaccgagcagctctccgagcaccagatggaaggcttcctcgaggcctacctgctcaccggccgtcacggcatctggagctcctacgagtccttcgtgcacgtgatcgactccatgctgaaccagcacgccaagtggctcgaggctaccgtccgcgagatcccgtggcgcaagccgatctcctccatgaacctgctcgtctcctcccacgtgtggcgtcaggatcacaacggcttctcccaccaggatccgggtgtcacctccgtcctgctgaacaagtgcttcaacaacgatcacgtgatcggcatctacttcccggtggattccaacatgctgctcgccgtggctgagaagtgctacaagtccaccgacatgatcaacgccatcatcgccggcaagcagccggccgccacctggctgaccctggacgaagctcgcgccgagctcgagaagggtgccgccgagtgggagtgggcctccaccgccaagtccaacgacgaagcacagatcgtgctcgcctccgctggcgatgtcccggctcaggagatcatggccgctgccgacaagctcgatgccatgggcatcaagttcaaggtcgtcaacgttgtggatctggtcaagctgcagtccaccaaggagaatgacgaagccatctccgacgccgacttcgctgacctgttcaccgaggacaagccggtcctgttcgcctaccactcctatgcccgcgacgtgcgtggtctgatctacgatcgcccgaaccacgacaacttcaacgtccacggctacgaggagcagggctccaccaccaccccgtacgacatggtgcgcgtgaacaacatcgatcgctacgagctcgttgccgaagctctgcgcatgatcgacgctgacaagtacgccgacaagatcgacgagctcgaggccttccgcaaggaagccttccagttcgcagtcgacaacggctacgatcacccggattacaccgactgggtgtactccggcgtcaacaccaacaagcagggtgctgtctccgctaccgccgcaaccgccggcgataacgagtga

SEQ ID NO: 212 - protein, 825 aa, Bifidobacterium dentium
MTSPVIGTPWKKLNAPVSEEAIEGVDKYWRAANYLSIGQIYLRSNPLMKEPFTREDVKHRLVGHWGTTPGLNFLIGHINRLIADHQQNTVIIMGPGHGGPAGTAQSYLDGTYTEYFPNITKDEAGLQKFFRQFSYPGGIPSHYAPETPGSIHEGGELGYALSHAYGAVMNNPSLFVPAIVGDGEAETGPLATGWQSNKLVNPRTDGIVLPILHLNGYKIANPTILSRISDEELHEFFHGMGYEPYEFVAGFDNEDHLSIHRRFAELFETVFDEICDIKAAAQTDDMTRPFYPMIIFRTPKGWTCPKFIDGKKTEGSWRSHQVPLASARDTEAHFEVLKNWLESYKPEELFDANGAVKPEVTAFMPTGELRIGENPNANGGRIREELNLPALEDYEVKEVAEYGHGWGQLEATRRLGVYTRDIIKNNPDSFRIFGPDETASNRLQAAYDVTNKQWDAGYLSAQVDEHMAVTGQVTEQLSEHQMEGFLEAYLLTGRHGIWSSYESFVHVIDSMLNQHAKWLEATVREIPWRKPISSMNLLVSSHVWRQDHNGFSHQDPGVTSVLLNKCFNNDHVIGIYFPVDSNMLLAVAEKCYKSTDMINAIIAGKQPAATWLTLDEARAELEKGAAEWEWASTAKSNDEAQIVLASAGDVPAQEIMAAADKLDAMGIKFKVVNVVDLVKLQSTKENDEAISDADFADLFTEDKPVLFAYHSYARDVRGLIYDRPNHDNFNVHGYEEQGSTTTPYDMVRVNNIDRYELVAEALRMIDADKYADKIDELEAFRKEAFQFAVDNGYDHPDYTDWVYSGVNTNKQGAVSATAATAGDNE

SEQ ID NO: 213 - DNA, 2478 bp, Bifidobacterium lactis
atgactaatcctgttattggtaccccatggcagaagctggatcgtccggtttccgaagaggccatcgaaggcatggacaagtactggcgcgtcgccaactacatgtctatcggccagatctacctgcgtagcaacccgctgatgaaggagcccttcacccgcgatgacgtgaagcaccgtctggtcggccactggggcaccaccccgggcctgaacttccttctcgcccacatcaaccgcctgatcgccgatcaccagcagaacaccgtgttcatcatgggtcctggccacggcggccctgcaggtaccgctcagtcctacatcgacggcacctacaccgagtactacccgaacatcaccaaggacgaagctggcctgcagaagttcttccgccagttctcctacccgggtggcattccttcccacttcgctccggagacgccgggctccatccacgaaggcggcgagctgggctacgccctgtcgcacgcctacggcgcgatcatggacaacccgagcctcttcgtcccgtgcatcatcggtgacggcgaagccgagaccggccctctggccaccggctggcagtccaacaagctcgtcaacccgcgcaccgacggcatcgtcctgccgatcctgcacctcaacggctacaagatcgccaacccgacgatcctcgcccgcatctccgacgaggagctgcacgacttcttccgcggcatgggttaccacccgtacgagttcgtcgccggcttcgacaacgaggatcacctgtcgatccaccgtcgcttcgccgagctcttcgagaccatcttcgacgagatctgcgatatcaaggctgcggctcagaccgacgacatgacccgtccgttctacccgatgctcatcttccgcaccccgaagggctggacctgcccgaagttcatcgacggcaagaagaccgaaggctcctggcgtgcacaccaggtcccgctggcttccgcccgcgacaccgaggcccacttcgaagtcctcaagggctggatggaatcctacaagccggaggagctcttcaacgccgacggctccatcaaggaggacgtcaccgcattcatgcctaagggcgaactgcgcatcggcgccaacccgaatgccaacggcggccgcatccgcgaggatctgaagctccctgagctcgatcagtacgagatcaccggcgtcaaggaatacggccacggttggggccaggtcgaggctccgcgttccctcggcgcgtactgccgcgacatcatcaagaacaacccggattcgttccgcgtcttcggacctgacgagaccgcgtccaaccgtctgaacgcgacctacgaggtcaccaagaagcagtgggacaacggatacctctcggctctcgtcgacgagaacatggccgtcaccggccaggttgtcgagcagctctccgagcatcagtgcgaaggcttcctcgaggcctacctgctcaccggccgtcacggcatctggagctcctacgagtccttcgtgcacgtgatcgactccatgctgaaccagcatgcgaagtggctcgaggccaccgtccgcgagatcccgtggcgtaagccgatctcctcggtgaacctcctggtctcctcgcacgtgtggcgtcaggatcacaacggcttctcgcaccaggatccgggtgtgacctccgtcctgctgaacaagacgttcaacaacgaccacgtgacgaacatctacttcgcgaccgatgccaacatgctgctggccatcgccgagaagtgcttcaagtccaccaacaagatcaacgcaatcttcgccggcaagcagccggccgcgacgtggatcaccctcgacgaggtacgcgccgagctcgaggctggtgccgccgagtggaagtgggcttccaacgccaagagcaacgacgaggtccaggttgtcctcgccgccgccggcgacgtcccgacccaggagatcatggccgcttccgatgccctcaacaagatgggcatcaagttcaaggtcgtcaacgtcgtggacctcatcaagctgcagtcctcgaaggagaacgacgaggccatgtctgacgaggacttcgccgacctgttcaccgcggacaagccggtcctcttcgcctaccactcctatgcccaggacgttcgtggcctcatctacgaccgcccgaaccacgacaacttcaccgttgtcggatacaaggagcagggctccacgacgacgccgttcgacatggtgcgtgtcaacgacatggatcgctacgcccttcaggccaaggccctcgagctcatcgacgccgacaagtatgccgacaagatcaacgagctcaacgagttccgcaagaccgcgttccagttcgccgtcgacaatggctatgacattcctgagttcaccgattgggtgtacccggatgtcaaggtcgacgagacctccatgctctccgccaccgccgcgaccgccggcgacaacgagtga

SEQ ID NO: 214 - protein, 825 aa, Bifidobacterium lactis
MTNPVIGTPWQKLDRPVSEEAIEGMDKYWRVANYMSIGQIYLRSNPLMKEPFTRDDVKHRLVGHWGTTPGLNFLLAHINRLIADHQQNTVFIMGPGHGGPAGTAQSYIDGTYTEYYPNITKDEAGLQKFFRQFSYPGGIPSHFAPETPGSIHEGGELGYALSHAYGAIMDNPSLFVPCIIGDGEAETGPLATGWQSNKLVNPRTDGIVLPILHLNGYKIANPTILARISDEELHDFFRGMGYHPYEFVAGFDNEDHLSIHRRFAELFETIFDEICDIKAAAQTDDMTRPFYPMLIFRTPKGWTCPKFIDGKKTEGSWRAHQVPLASARDTEAHFEVLKGWMESYKPEELFNADGSIKEDVTAFMPKGELRIGANPNANGGRIREDLKLPELDQYEITGVKEYGHGWGQVEAPRSLGAYCRDIIKNNPDSFRVFGPDETASNRLNATYEVTKKQWDNGYLSALVDENMAVTGQVVEQLSEHQCEGFLEAYLLTGRHGIWSSYESFVHVIDSMLNQHAKWLEATVREIPWRKPISSVNLLVSSHVWRQDHNGFSHQDPGVTSVLLNKTFNNDHVTNIYFATDANMLLAIAEKCFKSTNKINAIFAGKQPAATWITLDEVRAELEAGAAEWKWASNAKSNDEVQVVLAAAGDVPTQEIMAASDALNKMGIKFKVVNVVDLIKLQSSKENDEAMSDEDFADLFTADKPVLFAYHSYAQDVRGLIYDRPNHDNFTVVGYKEQGSTTTPFDMVRVNDMDRYALQAKALELIDADKYADKINELNEFRKTAFQFAVDNGYDIPEFTDWVYPDVKVDETSMLSATAATAGDNE

SEQ ID NO: 215 - DNA, 2367 bp, Unknown
  Lactobacillus paraplantarum Sequence
  misc_feature (75)..(75): n is a, c, g, or t
atgacaacagattactcatcaccagcatatttgcaaaaagttgataagtactggcgggcagccaactacttatcngttgggcaactttatttaaaagattatccattattacaacagccattgaaggccagtgacgttaaggttcatccaatttgtcactgggggacgattgccggtcaaaactctatctacgcgcaccttaaccgggttattaacaagtacggtttgaagatgttctacgttgaaggtccaggtcatggtggtcaagtgatggtttcaaactcttatcttgacggtacttacaccgatatttatccagaaattacgcaggatgttgaaggaatgcagaaactcttcaagcaattctcattcccaggtggggttgcttcccatgcggcacctgaaacacctggttcaatccacgaaggtggcgaactaggttactcaatttcacacggggttggggcaattcttgacaatcctgacgaaattgcagcggtcgttgttggtgatggggaatccgaaacgggtccattagcaacttcatggcaatcaacgaagttcattaacccaatcaatgacggggcagtgttaccaatcttgaacttaaatggttttaagatttctaacccaacgatttttggtcggacttctgatgctaagattaaggaatacttcgaaagcatgagctgggaaccaatcttcgttgaaggtgacgatcctgaaaaggttcacccagtcttagctaaagccatggatgaagccgttgaaaagatcaaggcaatccagaagcatgctcgtgaaaatgacgatgcgacgttgccagtatggccaatgatcgttttccgtgcacctaagggctggactggtcctaagtcatgggacggcgataagattgaaggttcattccgggcccatcaaattccgattcctgttgatcaaaatgacatggaacatgcggacgctttagttgattggcttgaatcatatcaaccaaaggaactcttcaatgaagatggttctttgaaggatgatattaaagaaattattcctactggggacagtcggatggcagctaacccaatcaccaatggtggggttgatccgaaagccttgaacttaccaaacttccgggattatgcggtcgatacgtccaaggaaggcgcgaatgttaagcaagatatgcttgtttggtcagactatttgcgggatgtcatcaagaagaatcctgataacttccggttgttcggacctgatgaaaccatgtctaaccgcttatatggtgtcttcgaaaccactaatcgtcaatggatggaagacattcatcccgatagtgaccaatatgaagctgcagctggccgggtcttagatgctcagttatctgaacaccaagctgaaggttggttagaaggttacgtcttaactggacgtcatgggttatttgccagttatgaagccttcctacgcgttgtggactcaatgttgacgcaacacttcaagtggttacgtaaggccaatgaacttgattggcgtaaaaagtacccatcacttaacattatcgcggcttcaactgtattccaacaagaccataatggttacacccaccaagatccaggtgcgttgactcatttggccgaaaagaaaccagaatacattcgcgaatatttaccagccgatgccaacacgttattagctgtcggtgacgtcattttccggagccaagaaaagatcaactacgtggttacgtcaaaacacccacgtcaacaatggttcagcattgaagaagctaaacaattagttgacaatggtcttggtatcattgactgggcaagcacggatcaaggtagcgaaccagacatcgtctttgcagctgctgggacggaaccaacgcttgaaacgttggctgccatccaattactacacgacagtttcccagagatgaagattcgtttcgtgaacgtggtcgacatcttgaagttacgtagtcctgaaaaggatccacggggcttgtcagatgctgaatttgaccattactttactaaggacaaaccagtggtctttgctttccacggttacgaagatttagttcgtgacatcttcttcgatcgtcacaaccataacttatacgtccacggttaccgtgaaaatggtgatattaccacaccattcgacgtacgggtcatgaaccaaatggatcgtttcgacttagctaagacggcgattgcggcgcaaccagcaatggaaaacaccggtgcggcctttgttcaatccatggataacatgcttgctaaacacaatgcatacattcgggatgccggaaccgacttgccagaagttaacgactggcaatggaaaggtttgaaataa

SEQ ID NO: 216 - protein, 788 aa, Unknown
  Lactobacillus paraplantarum Sequence
MTTDYSSPAYLQKVDKYWRAANYLSVGQLYLKDYPLLQQPLKASDVKVHPICHWGTIAGQNSIYAHLNRVINKYGLKMFYVEGPGHGGQVMVSNSYLDGTYTDIYPEITQDVEGMQKLFKQFSFPGGVASHAAPETPGSIHEGGELGYSISHGVGAILDNPDEIAAVVVGDGESETGPLATSWQSTKFINPINDGAVLPILNLNGFKISNPTIFGRTSDAKIKEYFESMSWEPIFVEGDDPEKVHPVLAKAMDEAVEKIKAIQKHARENDDATLPVWPMIVFRAPKGWTGPKSWDGDKIEGSFRAHQIPIPVDQNDMEHADALVDWLESYQPKELFNEDGSLKDDIKEIIPTGDSRMAANPITNGGVDPKALNLPNFRDYAVDTSKEGANVKQDMLVWSDYLRDVIKKNPDNFRLFGPDETMSNRLYGVFETTNRQWMEDIHPDSDQYEAAAGRVLDAQLSEHQAEGWLEGYVLTGRHGLFASYEAFLRVVDSMLTQHFKWLRKANELDWRKKYPSLNIIAASTVFQQDHNGYTHQDPGALTHLAEKKPEYIREYLPADANTLLAVGDVIFRSQEKINYVVTSKHPRQQWFSIEEAKQLVDNGLGIIDWASTDQGSEPDIVFAAAGTEPTLETLAAIQLLHDSFPEMKIRFVNVVDILKLRSPEKDPRGLSDAEFDHYFTKDKPVVFAFHGYEDLVRDIFFDRHNHNLYVHGYRENGDITTPFDVRVMNQMDRFDLAKTAIAAQPAMENTGAAFVQSMDNMLAKHNAYIRDAGTDLPEVNDWQWKGLK

SEQ ID NO: 217 - DNA, 2478 bp, Bifidobacterium breve
atgacaaatcctgttattggcaccccgtggcagaagctggatcgcccggtttccgaagaagccatcgaaggcatggacaagtattggcgcgtcaccaactacatgtccatcggccagatctatctgcgtagcaacccgctgatgaaggaacccttcacccgcgatgacgtgaagcaccgtctggtcggccactggggcaccaccccgggcctgaacttccttctcgcccacatcaaccgcctcatcgctgaccaccagcagaacaccgtgttcatcatgggcccgggccacggcggcccggctggcacctcccagtcttacgttgacggcacgtacaccgagtactacccgaacatcaccaaggacgaagctggcctgcagaagttcttccgccagttctcctacccgggcggcatcccgtcgcacttcgccccggagaccccgggatcgatccacgaaggtggcgagcttggctacgcgctctcccacgcatacggcgccgtgatgaacaacccgagcctgttcgtgccgtgcatcatcggcgacggcgaggccgagaccggcccgctcgccaccggctggcagtccaacaagctcgtcaacccgcgcaccgacggcatcgtgctgccgatcctgcacctcaacggctacaagatcgccaacccgaccatcctcgctcgtatctccgacgaagagctgcatgacttcttccgcggcatgggctaccacccgtacgagttcgttgccggcttcgacaacgaggaccacatgtcgatccaccgtcgtttcgccgagctgttcgagacgatcttcgacgagatctgcgacatcaaggctgcggcccagaccgacgacatgacccgtccgttctacccgatgctcatcttccgcaccccgaagggctggacctgcccgaagttcatcgacggcaagaagaccgaaggctcctggcgtgcgcaccaggtcccgctggcttccgcccgcgacaccgaagagcacttcgaagtcctcaagggctggatggaatcctacaagccggaagagctcttcaacgccgacggctccatcaaggatgacgtcaccgcgttcatgccgaagggcgagctccgcatcggcgccaacccgaacgccaacggtggtgtgatccgcgaggacctgaagctccccgagctcgaccagtacgaggtcaccggcgtcaaggagtacggccatggctggggccaggtcgaggctccgcgtgccctcggtgcatactgccgcgacatcatcaagaacaacccggattcgttccgcatcttcggaccggacgagaccgcttccaaccgcctgaacgcgacctacgaggtcaccgacaagcagtgggacaacggctacctttcgggtctcgtcgacgagcacatggcggtcaccggtcaggtcaccgagcagctctccgagcaccagtgcgagggcttcctcgaggcgtacctcctcaccggccgccacggcatctggagctcctacgagtccttcgtccacgtcatcgactcgatgctcaaccagcatgcgaagtggctcgaggccaccgtccgcgagatcccgtggcgcaagccgatctcctcggtgaacctcctcgtctcctcgcacgtgtggcgtcaggatcacaacggcttctcgcaccaggatccgggtgtcacctcgctcctgatcaacaagacgttcaacaacgatcacgtgacgaacatctacttcgcgaccgacgcgaacatgctgctcgcgatctccgagaagtgcttcaagtccaccaacaagatcaatgcgatcttcgccggcaagcagcctgctccgacgtgggtcacgctcgatgaggcccgcgccgagctcgaagccggcgccgctgagtggaagtgggcttccaacgccgagaacaacgatgaggtccaggtcgtcctcgcttccgctggcgatgtgccgacccaggagctcatggccgcctccgatgccctcaacaagatgggcatcaagttcaaggtcgtcaacgttgttgacctcctgaagctgcagtcccgcgagaacaacgacgaggccctcacggacgaggagttcaccgaactcttcaccgccgacaagccggttctgttcgcataccactcctacgctcaggatgttcgcggcctcatctacgaccgcccgaaccacgacaacttccacgtcgtcggctacaaggagcagggctccacgaccacgccgttcgacatggtccgcgtcaacgacatggatcgctatgcgctccaggccgctgccctcaagctgatcgatgccgacaagtacgccgacaagatcgacgagctcaacgcgttccgcaagaaggcgttccagttcgctgtcgacaacggctacgacatcccggagttcaccgactgggtgtacccggatgtcaaggtcgacgagacgcagatgctttccgcgaccgcggcgaccgcaggcgacaacgagtga

SEQ ID NO: 218 - protein, 825 aa, Bifidobacterium breve
MTNPVIGTPWQKLDRPVSEEAIEGMDKYWRVTNYMSIGQIYLRSNPLMKEPFTRDDVKHRLVGHWGTTPGLNFLLAHINRLIADHQQNTVFIMGPGHGGPAGTSQSYVDGTYTEYYPNITKDEAGLQKFFRQFSYPGGIPSHFAPETPGSIHEGGELGYALSHAYGAVMNNPSLFVPCIIGDGEAETGPLATGWQSNKLVNPRTDGIVLPILHLNGYKIANPTILARISDEELHDFFRGMGYHPYEFVAGFDNEDHMSIHRRFAELFETIFDEICDIKAAAQTDDMTRPFYPMLIFRTPKGWTCPKFIDGKKTEGSWRAHQVPLASARDTEEHFEVLKGWMESYKPEELFNADGSIKDDVTAFMPKGELRIGANPNANGGVIREDLKLPELDQYEVTGVKEYGHGWGQVEAPRALGAYCRDIIKNNPDSFRIFGPDETASNRLNATYEVTDKQWDNGYLSGLVDEHMAVTGQVTEQLSEHQCEGFLEAYLLTGRHGIWSSYESFVHVIDSMLNQHAKWLEATVREIPWRKPISSVNLLVSSHVWRQDHNGFSHQDPGVTSLLINKTFNNDHVTNIYFATDANMLLAISEKCFKSTNKINAIFAGKQPAPTWVTLDEARAELEAGAAEWKWASNAENNDEVQVVLASAGDVPTQELMAASDALNKMGIKFKVVNVVDLLKLQSRENNDEALTDEEFTELFTADKPVLFAYHSYAQDVRGLIYDRPNHDNFHVVGYKEQGSTTTPFDMVRVNDMDRYALQAAALKLIDADKYADKIDELNAFRKKAFQFAVDNGYDIPEFTDWVYPDVKVDETQMLSATAATAGDNE

SEQ ID NO: 219 - DNA, 2145 bp, Escherichia coli
gtgtcccgtattattatgctgatccctaccggaaccagcgtcggtctgaccagcgtcagccttggcgtgatccgtgcaatggaacgcaaaggcgttcgtctgagcgttttcaaacctatcgctcagccgcgtaccggtggcgatgcgcccgatcagactacgactatcgtgcgtgcgaactcttccaccacgacggccgctgaaccgctgaaaatgagctacgttgaaggtctgctttccagcaatcagaaagatgtgctgatggaagagatcgtcgcaaactaccacgctaacaccaaagacgctgaagtcgttctggttgaaggtctggtcccgacacgtaagcaccagtttgcccagtctctgaactacgaaatcgctaaaacgctgaatgcggaaatcgtcttcgttatgtctcagggcactgacaccccggaacagctgaaagagcgtatcgaactgacccgcaacagcttcggcggtgccaaaaacaccaacatcaccggcgttatcgttaacaaactgaacgcaccggttgatgaacagggtcgtactcgcccggatctgtccgagattttcgacgactcttccaaagctaaagtaaacaatgttgatccggcgaagctgcaagaatccagcccgctgccggttctcggcgctgtgccgtggagctttgacctgatcgcgactcgtgcgatcgatatggctcgccacctgaatgcgaccatcatcaacgaaggcgacatcaatactcgccgcgttaaatccgtcactttctgcgcacgcagcattccgcacatgctggagcacttccgtgccggttctctgctggtgacttccgcagaccgtcctgacgtgctggtggccgcttgcctggcagccatgaacggcgtagaaatcggtgccctgctgctgactggcggttacgaaatggacgcgcgcatttctaaactgtgcgaacgtgctttcgctaccggcctgccggtatttatggtgaacaccaacacctggcagacctctctgagcctgcagagcttcaacctggaagttccggttgacgatcacgaacgtatcgagaaagttcaggaatacgttgctaactacatcaacgctgactggatcgaatctctgactgccacttctgagcgcagccgtcgtctgtctccgcctgcgttccgttatcagctgactgaacttgcgcgcaaagcgggcaaacgtatcgtactgccggaaggtgacgaaccgcgtaccgttaaagcagccgctatctgtgctgaacgtggtatcgcaacttgcgtactgctgggtaatccggcagagatcaaccgtgttgcagcgtctcagggtgtagaactgggtgcagggattgaaatcgttgatccagaagtggttcgcgaaagctatgttggtcgtctggtcgaactgcgtaagaacaaaggcatgaccgaaaccgttgcccgcgaacagctggaagacaacgtggtgctcggtacgctgatgctggaacaggatgaagttgatggtctggtttccggtgctgttcacactaccgcaaacaccatccgtccgccgctgcagctgatcaaaactgcaccgggcagctccctggtatcttccgtgttcttcatgctgctgccggaacaggtttacgtttacggtgactgtgcgatcaacccggatccgaccgctgaacagctggcagaaatcgcgattcagtccgctgattccgctgcggccttcggtatcgaaccgcgcgttgctatgctctcctactccaccggtacttctggtgcaggtagcgacgtagaaaaagttcgcgaagcaactcgtctggcgcaggaaaaacgtcctgacctgatgatcgacggtccgctgcagtacgacgctgcggtaatggctgacgttgcgaaatccaaagcgccgaactctccggttgcaggtcgcgctaccgtgttcatcttcccggatctgaacaccggtaacaccacctacaaagcggtacagcgttctgccgacctgatctccatcgggccgatgctgcagggtatgcgcaagccggttaacgacctgtcccgtggcgcactggttgacgatatcgtctacaccatcgcgctgactgcgattcagtctgcacagcagcagtaa

SEQ ID NO: 220 - protein, 714 aa, Escherichia coli
MSRIIMLIPTGTSVGLTSVSLGVIRAMERKGVRLSVFKPIAQPRTGGDAPDQTTTIVRANSSTTTAAEPLKMSYVEGLLSSNQKDVLMEEIVANYHANTKDAEVVLVEGLVPTRKHQFAQSLNYEIAKTLNAEIVFVMSQGTDTPEQLKERIELTRNSFGGAKNTNITGVIVNKLNAPVDEQGRTRPDLSEIFDDSSKAKVNNVDPAKLQESSPLPVLGAVPWSFDLIATRAIDMARHLNATIINEGDINTRRVKSVTFCARSIPHMLEHFRAGSLLVTSADRPDVLVAACLAAMNGVEIGALLLTGGYEMDARISKLCERAFATGLPVFMVNTNTWQTSLSLQSFNLEVPVDDHERIEKVQEYVANYINADWIESLTATSERSRRLSPPAFRYQLTELARKAGKRIVLPEGDEPRTVKAAAICAERGIATCVLLGNPAEINRVAASQGVELGAGIEIVDPEVVRESYVGRLVELRKNKGMTETVAREQLEDNVVLGTLMLEQDEVDGLVSGAVHTTANTIRPPLQLIKTAPGSSLVSSVFFMLLPEQVYVYGDCAINPDPTAEQLAEIAIQSADSAAAFGIEPRVAMLSYSTGTSGAGSDVEKVREATRLAQEKRPDLMIDGPLQYDAAVMADVAKSKAPNSPVAGRATVFIFPDLNTGNTTYKAVQRSADLISIGPMLQGMRKPVNDLSRGALVDDIVYTIALTAIQSAQQQ

SEQ ID NO: 221 - DNA, 1002 bp, Clostridium acetobutylicum
atggatttaatagaaagcatatgggagtgtgctaagcaagacaaaaaaaggataatattagctgaaggtgaagaaaaaagaaatctaattgccgcagataaaattatcaaagagggattagcagagcttgttcttgtaggtgatgaaaataaaattaaagaaaaagcaagtgagttgaatcttgacatttcgaaggctgaaataatggatccagagacatcactaaaaacagaaacatatgctagagatttttatgaacttagaaaacacaaaggaatgactattgaaaaatctgaaaaaatggtaagagatcctctttattttgcaacaatggctttaaaagatggctatgttgatggaatggtttcaggagctgttcacacaactggagatttattaagaccaggacttcaaattataaaaactgcaccaggagttaaaatagtatcaggattctttgttatgataatacctgactgcgattatggtgaagagggtcttttattatttgcagattgtgctgtaaatcctaacccaacatcagatgaactagctgatattgctataactacagctgaaacagctagaaaattatgtaacgtagagcctaaagttgcgatgctttcattctcaactatgggaagtgcaaaaggcgaaatggtagataaggttaaaaatgctgttgaaatcacaaagaaattcagaccggatcttgctattgatggtgagcttcagcttgatgctgcaatagatagtgaagtagcggctttaaaagcaccttctagtaatgttgcaggaaatgcaaatgttcttgtattcccagatcttcaaacaggaaacattgggtacaagcttgttcaaagatttgcaaaagcaaaagcaataggacctatatgtcaaggatttgcaaaacctattaatgatttatcaagaggctgtagctcagaggatatagtaaatgttgttgctataactgttgttcaggctcaaagaggtatataa

SEQ ID NO: 222 - protein, 333 aa, Clostridium acetobutylicum
MDLIESIWECAKQDKKRIILAEGEEKRNLIAADKIIKEGLAELVLVGDENKIKEKASELNLDISKAEIMDPETSLKTETYARDFYELRKHKGMTIEKSEKMVRDPLYFATMALKDGYVDGMVSGAVHTTGDLLRPGLQIIKTAPGVKIVSGFFVMIIPDCDYGEEGLLLFADCAVNPNPTSDELADIAITTAETARKLCNVEPKVAMLSFSTMGSAKGEMVDKVKNAVEITKKFRPDLAIDGELQLDAAIDSEVAALKAPSSNVAGNANVLVFPDLQTGNIGYKLVQRFAKAKAIGPICQGFAKPINDLSRGCSSEDIVNVVAITVVQAQRGI

SEQ ID NO: 223 - DNA, 1647 bp, Lactococcus lactis
atgtatacagtaggagattacctattagaccgattacacgagttaggaattgaagaaatttttggagtccctggagactataacttacaatttttagatcaaattatttcccacaaggatatgaaatgggtcggaaatgctaatgaattaaatgcttcatatatggctgatggctatgctcgtactaaaaaagctgccgcatttcttacaacctttggagtaggtgaattgagtgcagttaatggattagcaggaagttacgccgaaaatttaccagtagtagaaatagtgggatcacctacatcaaaagttcaaaatgaaggaaaatttgttcatcatacgctggctgacggtgattttaaacactttatgaaaatgcacgaacctgttacagcagctcgaactttactgacagcagaaaatgcaaccgttgaaattgaccgagtactttctgcactattaaaagaaagaaaacctgtctatatcaacttaccagttgatgttgctgctgcaaaagcagagaaaccctcactccctttgaaaaaggaaaactcaacttcaaatacaagtgaccaagaaattttgaacaaaattcaagaaagcttgaaaaatgccaaaaaaccaatcgtgattacaggacatgaaataattagttttggcttagaaaaaacagtcactcaatttatttcaaagacaaaactacctattacgacattaaactttggtaaaagttcagttgatgaagccctcccttcatttttaggaatctataatggtacactctcagagcctaatcttaaagaattcgtggaatcagccgacttcatcttgatgcttggagttaaactcacagactcttcaacaggagccttcactcatcatttaaatgaaaataaaatgatttcactgaatatagatgaaggaaaaatatttaacgaaagaatccaaaattttgattttgaatccctcatctcctctctcttagacctaagcgaaatagaatacaaaggaaaatatatcgataaaaagcaagaagactttgttccatcaaatgcgcttttatcacaagaccgcctatggcaagcagttgaaaacctaactcaaagcaatgaaacaatcgttgctgaacaagggacatcattctttggcgcttcatcaattttcttaaaatcaaagagtcattttattggtcaacccttatggggatcaattggatatacattcccagcagcattaggaagccaaattgcagataaagaaagcagacaccttttatttattggtgatggttcacttcaacttacagtgcaagaattaggattagcaatcagagaaaaaattaatccaatttgctttattatcaataatgatggttatacagtcgaaagagaaattcatggaccaaatcaaagctacaatgatattccaatgtggaattactcaaaattaccagaatcgtttggagcaacagaagatcgagtagtctcaaaaatcgttagaactgaaaatgaatttgtgtctgtcatgaaagaagctcaagcagatccaaatagaatgtactggattgagttaattttggcaaaagaaggtgcaccaaaagtactgaaaaaaatgggcaaactatttgctgaacaaaataaatcataa

SEQ ID NO: 224 - protein, 548 aa, Lactococcus lactis
MYTVGDYLLDRLHELGIEEIFGVPGDYNLQFLDQIISHKDMKWVGNANELNASYMADGYARTKKAAAFLTTFGVGELSAVNGLAGSYAENLPVVEIVGSPTSKVQNEGKFVHHTLADGDFKHFMKMHEPVTAARTLLTAENATVEIDRVLSALLKERKPVYINLPVDVAAAKAEKPSLPLKKENSTSNTSDQEILNKIQESLKNAKKPIVITGHEIISFGLEKTVTQFISKTKLPITTLNFGKSSVDEALPSFLGIYNGTLSEPNLKEFVESADFILMLGVKLTDSSTGAFTHHLNENKMISLNIDEGKIFNERIQNFDFESLISSLLDLSEIEYKGKYIDKKQEDFVPSNALLSQDRLWQAVENLTQSNETIVAEQGTSFFGASSIFLKSKSHFIGQPLWGSIGYTFPAALGSQIADKESRHLLFIGDGSLQLTVQELGLAIREKINPICFIINNDGYTVEREIHGPNQSYNDIPMWNYSKLPESFGATEDRVVSKIVRTENEFVSVMKEAQADPNRMYWIELILAKEGAPKVLKKMGKLFAEQNKS

SEQ ID NO: 225 - DNA, 2802 bp, Escherichia coli
atgcagaacagcgctttgaaagcctggttggactcttcttacctctctggcgcaaaccagagctggatagaacagctctatgaagacttcttaaccgatcctgactcggttgacgctaactggcgttcgacgttccagcagttacctggtacgggagtcaaaccggatcaattccactctcaaacgcgtgaatatttccgccgcctggcgaaagacgcttcacgttactcttcaacgatctccgaccctgacaccaatgtgaagcaggttaaagtcctgcagctcattaacgcataccgcttccgtggtcaccagcatgcgaatctcgatccgctgggactgtggcagcaagataaagtggccgatctggatccgtctttccacgatctgaccgaagcagacttccaggagaccttcaacgtcggttcatttgccagcggcaaagaaaccatgaaactcggcgagctgctggaagccctcaagcaaacctactgcggcccgattggtgccgagtatatgcacattaccagcaccgaagaaaaacgctggatccaacagcgtatcgagtctggtcgcgcgactttcaatagcgaagagaaaaaacgcttcttaagcgaactgaccgccgctgaaggtcttgaacgttacctcggcgcaaaattccctggcgcaaaacgcttctcgctggaaggcggtgacgcgttaatcccgatgcttaaagagatgatccgccacgctggcaacagcggcacccgcgaagtggttctcgggatggcgcaccgtggtcgtctgaacgtgctggtgaacgtgctgggtaaaaaaccgcaagacttgttcgacgagttcgccggtaaacataaagaacacctcggcacgggtgacgtgaaataccacatgggcttctcgtctgacttccagaccgatggcggcctggtgcacctggcgctggcgtttaacccgtctcaccttgagattgtaagcccggtagttatcggttctgttcgtgcccgtctggacagacttgatgagccgagcagcaacaaagtgctgccaatcaccatccacggtgacgccgcagtgaccgggcagggcgtggttcaggaaaccctgaacatgtcgaaagcgcgtggttatgaagttggcggtacggtacgtatcgttatcaacaaccaggttggtttcaccacctctaatccgctggatgcccgttctacgccgtactgtactgatatcggtaagatggttcaggccccgattttccacgttaacgcggacgatccggaagccgttgcctttgtgacccgtctggcgctcgatttccgtaacacctttaaacgtgatgtcttcatcgacctggtgtgctaccgccgtcacggccacaacgaagccgacgagccgagcgcaacccagccgctgatgtatcagaaaatcaaaaaacatccgacaccgcgcaaaatctacgctgacaagctggagcaggaaaaagtggcgacgctggaagatgccaccgagatggttaacctgtaccgcgatgcgctggatgctggcgattgcgtagtggcagagtggcgtccgatgaacatgcactctttcacctggtcgccgtacctcaaccacgaatgggacgaagagtacccgaacaaagttgagatgaagcgcctgcaggagctggcgaaacgcatcagcacggtgccggaagcagttgaaatgcagtctcgcgttgccaagatttatggcgatcgccaggcgatggctgccggtgagaaactgttcgactggggcggtgcggaaaacctcgcttacgccacgctggttgatgaaggcattccggttcgcctgtcgggtgaagactccggtcgcggtaccttcttccaccgccacgcggtgatccacaaccagtctaacggttccacttacacgccgctgcaacatatccataacgggcagggcgcgttccgtgtctgggactccgtactgtctgaagaagcagtgctggcgtttgaatatggttatgccaccgcagaaccacgcactctgaccatctgggaagcgcagttcggtgacttcgccaacggtgcgcaggtggttatcgaccagttcatctcctctggcgaacagaaatggggccggatgtgtggtctggtgatgttgctgccgcacggttacgaagggcaggggccggagcactcctccgcgcgtctggaacgttatctgcaactttgtgctgagcaaaacatgcaggtttgcgtaccgtctaccccggcacaggtttaccacatgctgcgtcgtcaggcgctgcgcgggatgcgtcgtccgctggtcgtgatgtcgccgaaatccctgctgcgtcatccgctggcggtttccagcctcgaagaactggcgaacggcaccttcctgccagccatcggtgaaatcgacgagcttgatccgaagggcgtgaagcgcgtagtgatgtgttctggtaaggtttattacgacctgctggaacagcgtcgtaagaacaatcaacacgatgtcgccattgtgcgtatcgagcaactctacccgttcccgcataaagcgatgcaggaagtgttgcagcagtttgctcacgtcaaggattttgtctggtgccaggaagagccgctcaaccagggcgcatggtactgcagccagcatcatttccgtgaagtgattccgtttggggcttctctgcgttatgcaggccgcccggcctccgcctctccggcggtagggtatatgtccgttcaccagaaacagcaacaagatctggttaatgacgcgctgaacgtcgaataa

SEQ ID NO: 226 - protein, 933 aa, Escherichia coli
MQNSALKAWLDSSYLSGANQSWIEQLYEDFLTDPDSVDANWRSTFQQLPGTGVKPDQFHSQTREYFRRLAKDASRYSSTISDPDTNVKQVKVLQLINAYRFRGHQHANLDPLGLWQQDKVADLDPSFHDLTEADFQETFNVGSFASGKETMKLGELLEALKQTYCGPIGAEYMHITSTEEKRWIQQRIESGRATFNSEEKKRFLSELTAAEGLERYLGAKFPGAKRFSLEGGDALIPMLKEMIRHAGNSGTREVVLGMAHRGRLNVLVNVLGKKPQDLFDEFAGKHKEHLGTGDVKYHMGFSSDFQTDGGLVHLALAFNPSHLEIVSPVVIGSVRARLDRLDEPSSNKVLPITIHGDAAVTGQGVVQETLNMSKARGYEVGGTVRIVINNQVGFTTSNPLDARSTPYCTDIGKMVQAPIFHVNADDPEAVAFVTRLALDFRNTFKRDVFIDLVCYRRHGHNEADEPSATQPLMYQKIKKHPTPRKIYADKLEQEKVATLEDATEMVNLYRDALDAGDCVVAEWRPMNMHSFTWSPYLNHEWDEEYPNKVEMKRLQELAKRISTVPEAVEMQSRVAKIYGDRQAMAAGEKLFDWGGAENLAYATLVDEGIPVRLSGEDSGRGTFFHRHAVIHNQSNGSTYTPLQHIHNGQGAFRVWDSVLSEEAVLAFEYGYATAEPRTLTIWEAQFGDFANGAQVVIDQFISSGEQKWGRMCGLVMLLPHGYEGQGPEHSSARLERYLQLCAEQNMQVCVPSTPAQVYHMLRRQALRGMRRPLVVMSPKSLLRHPLAVSSLEELANGTFLPAIGEIDELDPKGVKRVVMCSGKVYYDLLEQRRKNNQHDVAIVRIEQLYPFPHKAMQEVLQQFAHVKDFVWCQEEPLNQGAWYCSQHHFREVIPFGASLRYAGRPASASPAVGYMSVHQKQQQDLVNDALNVE

SEQ ID NO: 227 - DNA, 1233 bp, Escherichia coli
atggcaaaggtatcgctggagaaagacaagattaagtttctgctggtagaaggcgtgcaccaaaaggcgctggaaagccttcgtgcagctggttacaccaacatcgaatttcacaaaggcgcgctggatgatgaacaattaaaagaatccatccgcgatgcccacttcatcggcctgcgatcccgtacccatctgactgaagacgtgatcaacgccgcagaaaaactggtcgctattggctgtttctgtatcggaacaaaccaggttgatctggatgcggcggcaaagcgcgggatcccggtatttaacgcaccgttctcaaatacgcgctctgttgcggagctggtgattggcgaactgctgctgctattgcgcggcgtgccggaagccaatgctaaagcgcaccgtggcgtgtggaacaaactggcggcgggttcttttgaagcgcgcggcaaaaagctgggtatcatcggctacggtcatattggtacgcaattgggcattctggctgaatcgctgggaatgtatgtttacttttatgatattgaaaataaactgccgctgggcaacgccactcaggtacagcatctttctgacctgctgaatatgagcgatgtggtgagtctgcatgtaccagagaatccgtccaccaaaaatatgatgggcgcgaaagaaatttcactaatgaagcccggctcgctgctgattaatgcttcgcgcggtactgtggtggatattccggcgctgtgtgatgcgctggcgagcaaacatctggcgggggcggcaatcgacgtattcccgacggaaccggcgaccaatagcgatccatttacctctccgctgtgtgaattcgacaacgtccttctgacgccacacattggcggttcgactcaggaagcgcaggagaatatcggcctggaagttgcgggtaaattgatcaagtattctgacaatggctcaacgctctctgcggtgaacttcccggaagtctcgctgccactgcacggtgggcgtcgtctgatgcacatccacgaaaaccgtccgggcgtgctaactgcgctgaacaaaatcttcgccgagcagggcgtcaacatcgccgcgcaatatctgcaaacttccgcccagatgggttatgtggttattgatattgaagccgacgaagacgttgccgaaaaagcgctgcaggcaatgaaagctattccgggtaccattcgcgcccgtctgctgtactaa

SEQ ID NO: 228 - protein, 410 aa, Escherichia coli
MAKVSLEKDKIKFLLVEGVHQKALESLRAAGYTNIEFHKGALDDEQLKESIRDAHFIGLRSRTHLTEDVINAAEKLVAIGCFCIGTNQVDLDAAAKRGIPVFNAPFSNTRSVAELVIGELLLLLRGVPEANAKAHRGVWNKLAAGSFEARGKKLGIIGYGHIGTQLGILAESLGMYVYFYDIENKLPLGNATQVQHLSDLLNMSDVVSLHVPENPSTKNMMGAKEISLMKPGSLLINASRGTVVDIPALCDALASKHLAGAAIDVFPTEPATNSDPFTSPLCEFDNVLLTPHIGGSTQEAQENIGLEVAGKLIKYSDNGSTLSAVNFPEVSLPLHGGRRLMHIHENRPGVLTALNKIFAEQGVNIAAQYLQTSAQMGYVVIDIEADEDVAEKALQAMKAIPGTIRARLLY

SEQ ID NO: 229 - DNA, 1089 bp, Escherichia coli
atggctcaaatcttcaattttagttctggtccggcaatgctaccggcagaggtgcttaaacaggctcaacaggaactgcgcgactggaacggtcttggtacgtcggtgatggaagtgagtcaccgtggcaaagagttcattcaggttgcagaggaagccgagaaggattttcgcgatcttcttaatgtcccctccaactacaaggtattattctgccatggcggtggtcgcggtcagtttgctgcggtaccgctgaatattctcggtgataaaaccaccgcagattatgttgatgccggttactgggcggcaagtgccattaaagaagcgaaaaaatactgcacgcctaatgtctttgacgccaaagtgactgttgatggtctgcgcgcggttaagccaatgcgtgaatggcaactctctgataatgctgcttatatgcattattgcccgaatgaaaccatcgatggtatcgccatcgacgaaacgccagacttcggcgcagatgtggtggtcgccgctgacttctcttcaaccattctttcccgtccgattgacgtcagccgttatggtgtaatttacgctggcgcgcagaaaaatatcggcccggctggcctgacaatcgtcatcgttcgtgaagatttgctgggcaaagcgaatatcgcgtgtccgtcgattctggattattccatcctcaacgataacggctccatgtttaacacgccgccgacatttgcctggtatctatctggtctggtctttaaatggctgaaagcgaacggcggtgtagctgaaatggataaaatcaatcagcaaaaagcagaactgctatatggggtgattgataacagcgatttctaccgcaatgacgtggcgaaagctaaccgttcgcggatgaacgtgccgttccagttggcggacagtgcgcttgacaaattgttccttgaagagtcttttgctgctggccttcatgcactgaaaggtcaccgtgtggtcggcggaatgcgcgcttctatttataacgccatgccgctggaaggcgttaaagcgctgacagacttcatggttgagttcgaacgccgtcacggttaa

SEQ ID NO: 230 - protein, 362 aa, Escherichia coli
MAQIFNFSSGPAMLPAEVLKQAQQELRDWNGLGTSVMEVSHRGKEFIQVAEEAEKDFRDLLNVPSNYKVLFCHGGGRGQFAAVPLNILGDKTTADYVDAGYWAASAIKEAKKYCTPNVFDAKVTVDGLRAVKPMREWQLSDNAAYMHYCPNETIDGIAIDETPDFGADVVVAADFSSTILSRPIDVSRYGVIYAGAQKNIGPAGLTIVIVREDLLGKANIACPSILDYSILNDNGSMFNTPPTFAWYLSGLVFKWLKANGGVAEMDKINQQKAELLYGVIDNSDFYRNDVAKANRSRMNVPFQLADSALDKLFLEESFAAGLHALKGHRVVGGMRASIYNAMPLEGVKALTDFMVEFERRHG

SEQ ID NO: 231 - DNA, 579 bp, Escherichia coli
gtggaataccgtagcctgacgcttgatgattttttatcgcgctttcaacttttgcgcccgcaaattaaccgggaaaccctaaatcatcgtcaggctgctgtgttaatccccatcgtccgtcgaccgcaaccggggttgttgctgactcagcgttcgattcatctgcgtaaacacgctggacaagtggcattccctggaggtgcagtcgatgacacggacgcatcagctatcgccgccgcgctgcgcgaagctgaagaagaggtcgctataccgccttccgccgttgaagttatcggcgtgctgccgcccgtcgatagcgtcactggctaccaggtaaccccagtggtcggcattatcccgcccgatctgccgtatcgcgccagtgaagatgaagtctcggcggtgtttgaaatgccgctcgcccaggcattacatctgggtcgttatcaccctttagatatctaccgccgtggtgattcacatcgggtatggctgtcctggtacgaacagtattttgtatggggaatgaccgcaggcataattcgtgagctggcgctgcaaattggtgtgaaaccctga

SEQ ID NO: 232 - protein, 192 aa, Escherichia coli
MEYRSLTLDDFLSRFQLLRPQINRETLNHRQAAVLIPIVRRPQPGLLLTQRSIHLRKHAGQVAFPGGAVDDTDASAIAAALREAEEEVAIPPSAVEVIGVLPPVDSVTGYQVTPVVGIIPPDLPYRASEDEVSAVFEMPLAQALHLGRYHPLDIYRRGDSHRVWLSWYEQYFVWGMTAGIIRELALQIGVKP

SEQ ID NO: 233 - DNA, 969 bp, Escherichia coli
atgcctaacattacctggtgcgacctgcctgaagatgtctctttatggccgggtctgcctctttcattaagtggtgatgaagtgatgccactggattaccacgcaggtcgtagcggctggctgctgtatggtcgtgggctggataaacaacgtctgacccaataccagagcaaactgggtgcggcgatggtgattgttgccgcctggtgcgtggaagattatcaggtgattcgtctggcaggttcactcaccgcacgggctacacgcctggcccacgaagcgcagctggatgtcgccccgctggggaaaatcccgcacctgcgcacgccgggtttgctggtgatggatatggactccaccgccatccagattgaatgtattgatgaaattgccaaactggccggaacgggcgagatggtggcggaagtaaccgaacgggcgatgcgcggcgaactcgattttaccgccagcctgcgcagccgtgtggcgacgctgaaaggcgctgacgccaatattctgcaacaggtgcgtgaaaatctgccgctgatgccaggcttaacgcaactggtgctcaagctggaaacgctgggctggaaagtggcgattgcctccggcggctttactttctttgctgaatacctgcgcgacaagctgcgcctgaccgccgtggtagccaatgaactggagatcatggacggtaaatttaccggcaatgtgatcggcgacatcgtagacgcgcagtacaaagcgaaaactctgactcgcctcgcgcaggagtatgaaatcccgctggcgcagaccgtggcgattggcgatggagccaatgacctgccgatgatcaaagcggcagggctggggattgcctaccatgccaagccaaaagtgaatgaaaaggcggaagtcaccatccgtcacgctgacctgatgggggtattctgcatcctctcaggcagcctgaatcagaagtaa

SEQ ID NO: 234 - protein, 322 aa, Escherichia coli [sequence omitted]

SEQ ID NO: 235 - DNA, 2233 bp, Arabidopsis thaliana
cgaaagggcaaaaaccaaaaagagaatcaaattttgcctcttctatataaatcaaatcaacgacgaagcgtcgctctcgttttctgtgtgtctctctctttgtcccaccattttcaccgcttctcctccaatcactcagatctacagattcctttaaaacaacaatggttggatctttggaatctgatcaaactctttcaatggccaccttaatcgaaaaactcgacatcttatctgacgacttcgatccaaccgccgtagtcaccgaaccgttacctcctccggtaactaatggaatcggagctgataaaggaggaggaggaggagaaagagagatggttctcggtaggaatatacacacaacgtcactcgctgtaacggaaccggaggttaacgatgaattcaccggagataaagaagcttatatggctagtgttcttgctcgttaccggaaaactttggttgaacgaaccaaaaaccatttaggtaaaatttgatctgatctgatctttttttttgaatcggaatcggaatctgaatcggaatctggtgtaggttatccttataacttggatttcgactatggtgcgcttggtcagttacaacatttttcgattaataatcttggagatccgtttattgaaagtaactatggtgtacactcaagaccttttgaagttggtgtgttggattggtttgctcgtctttgggagattgagagagatgattattggggttacattaccaattgtggtactgaaggcaaccttcatggcattttagtcgggtacgtttttcgaaaatcatcggtgttttgattcattcgaaaaaccgaaaaaaaacggtgtttgatttgatgtgtgtttgtaggagggagatgtttccggatgggatattgtatgcgtcgcgtgaatcgcattactcggtgtttaaagctgctcgaatgtatcgaatggagtgtgagaaggttgatacgcttatgtcaggggagattgattgtgatgatttgaggaagaagttgttggctaataaagataaaccggcgattcttaatgttaacataggttggtttatgttttagtactttggctttgtttgttgtgttaggattggtgctaatggttgaaatcttgttttctttaggaacgacggttaaaggagctgttgatgatcttgaccttgttatcaaaactcttgaagagtgtggtttctcacatgataggttctatattcattgtgatggagctttgtttggacttatgatgccttttgtcaaacgtgtaagtgtatagtcttcagtctaagcgaaatcgttatgataatctttgttctgctctgagatttgttgttttatctcctctgtaggcaccgaaagtgacgtttaataaaccgatagggagtgtgagtgtatcgggccacaaatttgtcgggtgtccaatgccatgtggtgttcagataacaagaatggaacatatcaaagtcctctccagtaacgttgagtaccttgcttcaagggatgcaacaatcatgggaagtcgtaacgggcatgctcctttgttcctctggtacaccttaaacaggaaaggttacaaaggattccagaaagaagttcagaaatgcttgagaaacgcgcattacctcaaagaccgacttcgtgaagctgggattagcgccatgcttaatgagcttagcagcactgtggtctttgaacggcctaaagatgaagagtttgttagaaggtggcagcttgcttgccaaggtgatatagctcatgtggtggttatgccaagtgttacaatcgagaagcttgataatttcctgaaagaccttgtcaaacacagattgatctggtacgaggatggatctcagcctccttgccttgcatcggaggtaggaaccaacaactgcatctgtccagctcacaagtgacggcaccatttctcatttgttggtattgttgttttctagtaagccacatctagtttaaattcctcatcactgtattcctgaacttggtttcaatcatcgtaaaattttgtcagtttctcttatttacaagttaaggtttcaaacagtgtttacaatttgtagctcaatctggagcatgatcaaccttcacttcgtcgttcgcaatcgtttaccgagttttagcattatcgtaacagcaagtatgtgccttaagccgctgatttagctgcgtgtttgatgatcggtgcttaatgcctaggaaaag

SEQ ID NO: 236 - protein, 482 aa, Arabidopsis thaliana
MVGSLESDQTLSMATLIEKLDILSDDFDPTAVVTEPLPPPVTNGIGADKGGGGGEREMVLGRNIHTTSLAVTEPEVNDEFTGDKEAYMASVLARYRKTLVERTKNHLGYPYNLDFDYGALGQLQHFSINNLGDPFIESNYGVHSRPFEVGVLDWFARLWEIERDDYWGYITNCGTEGNLHGILVGREMFPDGILYASRESHYSVFKAARMYRMECEKVDTLMSGEIDCDDLRKKLLANKDKPAILNVNIGTTVKGAVDDLDLVIKTLEECGFSHDRFYIHCDGALFGLMMPFVKRAPKVTFNKPIGSVSVSGHKFVGCPMPCGVQITRMEHIKVLSSNVEYLASRDATIMGSRNGHAPLFLWYTLNRKGYKGFQKEVQKCLRNAHYLKDRLREAGISAMLNELSSTVVFERPKDEEFVRRWQLACQGDIAHVVVMPSVTIEKLDNFLKDLVKHRLIWYEDGSQPPCLASEVGTNNCICPAHK

SEQ ID NO: 237 - DNA, 2274 bp, Escherichia coli
atgggaagcccctctctgtattctgcccgtaaaacaaccctggcgttggcagtcgccttaagtttcgcctggcaagcgccggtatttgcccacggtggtgaagcgcatatggtgccaatggataaaacgcttaaagaatttggtgccgatgtgcagtgggacgactacgcccagctctttaccctgattaaagatggcgcgtacgtgaaagtgaagcctggtgcgcaaacagcaattgttaatggtcagcctctggcactgcaagtaccggtagtgatgaaagacaataaagcctgggtttctgacacctttattaacgatgttttccagtccgggctggatcaaacctttcaggtagaaaagcgccctcacccacttaatgcgctaactgcggacgaaattaaacaggccgttgaaattgttaaagcttccgcggacttcaaacccaatacccgttttactgagatctccctgctaccgccagataaagaagctgtctgggcgtttgcgctggaaaacaaaccggttgaccagccgcgcaaagccgacgtcattatgctcgacggcaaacatatcatcgaagcggtggtggatctgcaaaacaacaaactgctctcctggcaacccattaaagacgcccacggtatggtgttgctggatgatttcgccagtgtgcagaacattattaacaacagtgaagaatttgccgctgccgtgaagaaacgcggtattactgatgcgaaaaaagtgattaccacgccgctgaccgtaggttatttcgatggtaaagatggcctgaaacaagatgcccggttgctcaaagtcatcagctatcttgatgtcggtgatggcaactactgggcacatcccatcgaaaacctggtggcggtcgttgatttagaacagaaaaaaatcgttaagattgaagaaggtccggtagttccggtgccaatgaccgcacgcccatttgatggccgtgaccgcgttgctccggcagttaagcctatgcaaatcattgagcctgaaggtaaaaattacaccattactggcgatatgattcactggcggaactgggattttcacctcagcatgaactctcgcgtcgggccgatgatctccaccgtgacttataacgacaatggcaccaaacgcaaagtcatgtacgaaggttctctcggcggcatgattgtgccttacggtgatcctgatattggctggtactttaaagcgtatctggactctggtgactacggtatgggcacgctaacctcaccaattgctcgtggtaaagatgccccgtctaacgcagtgctccttaatgaaaccatcgccgactacactggcgtgccgatggagatccctcgcgctatcgcggtatttgaacgttatgccgggccggagtataagcatcaggaaatgggccagcccaacgtcagtaccgaacgccgggagttagtggtgcgctggatcagtacagtgggtaactatgactacatttttgactggatcttccatgaaaacggcactattggcatcgatgccggtgctacgggcatcgaagcggtgaaaggtgttaaagcgaaaaccatgcacgatgagacggcgaaagatgacacgcgctacggcacgcttatcgatcacaatatcgtgggtactacacaccaacatatttataatttccgcctcgatctggatgtagatggcgagaataacagcctggtggcgatggacccagtggtaaaaccgaatactgccggtggcccacgcaccagtaccatgcaagttaatcagtacaacatcggcaatgaacaggatgccgcacagaaatttgatccgggcacgattcgtctgttgagtaacccgaacaaagagaaccgcatgggcaatccggtttcctatcaaattattccttatgcaggtggtactcacccggtagcaaaaggtgcccagttcgcgccggacgagtggatctatcatcgtttaagctttatggacaagcagctctgggtaacgcgttatcatcctggcgagcgtttcccggaaggcaaatatccgaaccgttctactcatgacaccggtcttggacaatacagtaaggataacgagtcgctggacaacaccgacgccgttgtctggatgaccaccggcaccacacatgtggcccgcgccgaagagtggccgattatgccgaccgaatgggtacatactctgctgaaaccatggaacttctttgacgaaacgccaacgctaggggcgctgaagaaagataagtga

SEQ ID NO: 238 - protein, 757 aa, Escherichia coli
MGSPSLYSARKTTLALAVALSFAWQAPVFAHGGEAHMVPMDKTLKEFGADVQWDDYAQLFTLIKDGAYVKVKPGAQTAIVNGQPLALQVPVVMKDNKAWVSDTFINDVFQSGLDQTFQVEKRPHPLNALTADEIKQAVEIVKASADFKPNTRFTEISLLPPDKEAVWAFALENKPVDQPRKADVIMLDGKHIIEAVVDLQNNKLLSWQPIKDAHGMVLLDDFASVQNIINNSEEFAAAVKKRGITDAKKVITTPLTVGYFDGKDGLKQDARLLKVISYLDVGDGNYWAHPIENLVAVVDLEQKKIVKIEEGPVVPVPMTARPFDGRDRVAPAVKPMQIIEPEGKNYTITGDMIHWRNWDFHLSMNSRVGPMISTVTYNDNGTKRKVMYEGSLGGMIVPYGDPDIGWYFKAYLDSGDYGMGTLTSPIARGKDAPSNAVLLNETIADYTGVPMEIPRAIAVFERYAGPEYKHQEMGQPNVSTERRELVVRWISTVGNYDYIFDWIFHENGTIGIDAGATGIEAVKGVKAKTMHDETAKDDTRYGTLIDHNIVGTTHQHIYNFRLDLDVDGENNSLVAMDPVVKPNTAGGPRTSTMQVNQYNIGNEQDAAQKFDPGTIRLLSNPNKENRMGNPVSYQIIPYAGGTHPVAKGAQFAPDEWIYHRLSFMDKQLWVTRYHPGERFPEGKYPNRSTHDTGLGQYSKDNESLDNTDAVVWMTTGTTHVARAEEWPIMPTEWVHTLLKPWNFFDETPTLGALKKDK

SEQ ID NO: 239 - DNA, 1218 bp, Escherichia coli
atgtcccccattgaaaaatccagcaaattagagaatgtctgttatgacatccgtggtccggtgctgaaagaagcaaaacgcctggaagaagaaggtaacaaggtactgaaactgaacatcggcaacccagccccgttcggttttgacgcgccagatgaaatcctcgttgacgtgatacgcaacctgcctaccgctcaagggtattgcgattccaaaggtctttactccgcgcgtaaagccatcatgcagcactaccaggctcgtggcatgcgtgatgttaccgtggaagatatttacatcggcaatggtgtatcggagcttatcgttcaggcaatgcaggcattgctgaacagcggggacgaaatgttggttcctgcaccagattacccactctggaccgcggcggtttcgctttccagcggtaaagcggtgcattatctttgcgatgaatcctctgactggttcccggacctcgatgatattcgcgctaaaattacgcctcgtacgcgtgggatcgttattatcaacccaaataacccaaccggcgcggtatattccaaagagcttttaatggagattgtggagattgcacgtcagcataatctcattatcttcgccgatgaaatttatgacaaaattctctacgacgacgctgagcatcactcaattgcgccgctggcacctgacctgctgaccattacctttaacggactgtcgaaaacgtaccgcgttgcaggcttccgtcaggggtggatggtgttgaacgggccgaaaaaacacgccaaaggctacatcgaaggtctggaaatgctggcttcaatgcgcctgtgtgctaacgttcctgcgcaacacgccattcagaccgcgctaggtggttatcagagcatcagtgaatttattacccctggcggtcgtctttatgagcagcgtaaccgcgcgtgggaactgatcaacgatattccgggcgtttcctgcgtgaaacctcgtggtgcgctgtatatgttcccgaaaatcgacgccaaacgctttaacattcacgacgatcagaaaatggtgttggatttcctgttgcaggaaaaagttctgttggtgcaagggacggcattcaactggccgtggccggatcacttccgcattgtcacgctaccgcgtgtcgatgatatcgagctgtctttgagcaagttcgcgcgtttcctttctggttatcatcagctgtaa

SEQ ID NO: 240 - protein, 405 aa, Escherichia coli
MSPIEKSSKLENVCYDIRGPVLKEAKRLEEEGNKVLKLNIGNPAPFGFDAPDEILVDVIRNLPTAQGYCDSKGLYSARKAIMQHYQARGMRDVTVEDIYIGNGVSELIVQAMQALLNSGDEMLVPAPDYPLWTAAVSLSSGKAVHYLCDESSDWFPDLDDIRAKITPRTRGIVIINPNNPTGAVYSKELLMEIVEIARQHNLIIFADEIYDKILYDDAEHHSIAPLAPDLLTITFNGLSKTYRVAGFRQGWMVLNGPKKHAKGYIEGLEMLASMRLCANVPAQHAIQTALGGYQSISEFITPGGRLYEQRNRAWELINDIPGVSCVKPRGALYMFPKIDAKRFNIHDDQKMVLDFLLQEKVLLVQGTAFNWPWPDHFRIVTLPRVDDIELSLSKFARFLSGYHQL

SEQ ID NO: 241 - DNA, 975 bp, Escherichia coli
atgaagccgtccgttatcctctacaaagccttacctgatgatttactgcaacgcctgcaagagcatttcaccgttcaccaggtggcaaacctcagcccacaaaccgtcgaacaaaatgcagcaatttttgccgaagctgaaggtttactgggttcaaacgagaatgtaaatgccgcattgctggaaaaaatgccgaaactgcgtgccacatcaacgatctccgtcggctatgacaattttgatgtcgatgcgcttaccgcccgaaaaattctgctgatgcacacgccaaccgtattaacagaaaccgtcgccgatacgctgatggcgctggtgttgtctaccgctcgtcgggttgtggaggtagcagaacgggtaaaagcaggcgaatggaccgcgagcataggcccggactggtacggcactgacgttcaccataaaacactgggcattgtcgggatgggacggatcggcatggcgctggcacaacgtgcgcactttggcttcaacatgcccatcctctataacgcgcgccgccaccataaagaagcagaagaacgcttcaacgcccgctactgcgatttggatactctgttacaagagtcagatttcgtttgcctgatcctgccgttaactgatgagacgcatcatctgtttggcgcagaacaattcgccaaaatgaaatcctccgccattttcattaatgccggacgtggcccggtggttgacgaaaatgcactgatcgcagcattgcagaaaggcgaaattcacgctgccgggctggatgtcttcgaacaagagccactgtccgtagattcgccgttgctctcaatggccaacgtcgtcgcagtaccgcatattggatctgccacccatgagacgcgttatggcatggccgcctgtgccgtggataatttgattgatgcgttacaaggaaaggttgagaagaactgtgtgaatccgcacgtcgcggactaa

SEQ ID NO: 242 - protein, 324 aa, Escherichia coli
MKPSVILYKALPDDLLQRLQEHFTVHQVANLSPQTVEQNAAIFAEAEGLLGSNENVNAALLEKMPKLRATSTISVGYDNFDVDALTARKILLMHTPTVLTETVADTLMALVLSTARRVVEVAERVKAGEWTASIGPDWYGTDVHHKTLGIVGMGRIGMALAQRAHFGFNMPILYNARRHHKEAEERFNARYCDLDTLLQESDFVCLILPLTDETHHLFGAEQFAKMKSSAIFINAGRGPVVDENALIAALQKGEIHAAGLDVFEQEPLSVDSPLLSMANVVAVPHIGSATHETRYGMAACAVDNLIDALQGKVEKNCVNPHVAD

SEQ ID NO: 243 - DNA, 1179 bp, Homo sapiens
atggcctctcacaagctgctggtgaccccccccaaggccctgctcaagcccctctccatccccaaccagctcctgctggggcctggtccttccaacctgcctcctcgcatcatggcagccggggggctgcagatgatcgggtccatgagcaaggatatgtaccagatcatggacgagatcaaggaaggcatccagtacgtgttccagaccaggaacccactcacactggtcatctctggctcgggacactgtgccctggaggccgccctggtcaatgtgctggagcctggggactccttcctggttggggccaatggcatttgggggcagcgagccgtggacatcggggagcgcataggagcccgagtgcacccgatgaccaaggaccctggaggccactacacactgcaggaggtggaggagggcctggcccagcacaagccagtgctgctgttcttaacccacggggagtcgtccaccggcgtgctgcagccccttgatggcttcggggaactctgccacaggtacaagtgcctgctcctggtggattcggtggcatccctgggcgggacccccctttacatggaccggcaaggcatcgacatcctgtactcgggctcccagaaggccctgaacgcccctccagggacctcgctcatctccttcagtgacaaggccaaaaagaagatgtactcccgcaagacgaagcccttctccttctacctggacatcaagtggctggccaacttctggggctgtgacgaccagcccaggatgtaccatcacacaatccccgtcatcagcctgtacagcctgagagagagcctggccctcattgcggaacagggcctggagaacagctggcgccagcaccgcgaggccgcggcgtatctgcatgggcgcctgcaggcactggggctgcagctcttcgtgaaggacccggcgctccggcttcccacagtcaccactgtggctgtacccgctggctatgactggagagacatcgtcagctacgtcatagaccacttcgacattgagatcatgggtggccttgggccctccacggggaaggtgctgcggatcggcctgctgggctgcaatgccacccgcgagaatgtggaccgcgtgacggaggccctgagggcggccctgcagcactgccccaagaagaagctgtga

SEQ ID NO: 244 - protein, 392 aa, Homo sapiens
MASHKLLVTPPKALLKPLSIPNQLLLGPGPSNLPPRIMAAGGLQMIGSMSKDMYQIMDEIKEGIQYVFQTRNPLTLVISGSGHCALEAALVNVLEPGDSFLVGANGIWGQRAVDIGERIGARVHPMTKDPGGHYTLQEVEEGLAQHKPVLLFLTHGESSTGVLQPLDGFGELCHRYKCLLLVDSVASLGGTPLYMDRQGIDILYSGSQKALNAPPGTSLISFSDKAKKKMYSRKTKPFSFYLDIKWLANFWGCDDQPRMYHHTIPVISLYSLRESLALIAEQGLENSWRQHREAAAYLHGRLQALGLQLFVKDPALRLPTVTTVAVPAGYDWRDIVSYVIDHFDIEIMGGLGPSTGKVLRIGLLGCNATRENVDRVTEALRAALQHCPKKKL

SEQ ID NO: 245 - DNA, 10 bp, Escherichia coli
aaaaaaaaaa

SEQ ID NO: 246 - protein, 6 aa, Escherichia coli
LANFWG

SEQ ID NO: 247 - DNA, 10 bp, Arabidopsis thaliana
aaaaaaaaaa

SEQ ID NO: 248 - protein, 5 aa, Arabidopsis thaliana
FVKDP

SEQ ID NO: 249 - DNA, 1146 bp, Escherichia coli
atgaagattgtcattgcgccagactcttttaaagagagcttaagtgcagaaaaatgttgtcaggcaattaaagccgggttttcgaccctctttcccgatgcgaactatatctgtttgccgatagcggatggcggcgaagggacggtggatgcgatggtcgccgcgacgggcggcaacatcgtgacgcttgaagtctgcgggccgatgggcgaaaaagtgaatgctttttatggccttaccggcgacgggaaaacggcggtgattgagatggcggcagcaagtggcctgatgctggtcgcgcctgaaaagcgtaatccgttgctggcctccagttttggtacgggggagttaattcgtcatgcgctggataacgacattcgccatattattctcggcattggcggcagtgcgacggtcgacggcggtatgggcatggcgcaggcgctcggtgtgcgtttccttgatgccgacggtcaggcgctggcggcaaacggtggtaatttagcgcgcgtggcaagcattgagatggatgaatgcgatccgcgtctggcgaattgccatattgaagtagcatgtgacgttgataacccgctggtaggggcacgcggcgcggcggcggtgtttggcccgcaaaaaggggcaacgccggagatggtcgaagaacttgaacaggggctgcaaaattacgcccgtgttttacaacagcaaactgaaattaatgtctgccagatggcgggcggcggcgctgcgggcggtatgggtattgcggcggcggtatttctcaatgcggatattaaaccgggcattgaaattgtgttgaatgcggtcaatcttgcgcaggcagtgcagggcgcagcactggtgattaccggggaagggcgcatcgactcgcaaacggcaggcggtaaagcgccgctgggtgtggcgtcggtggcgaagcagtttaatgtaccggtgattgggattgctggcgtattgggtgatggcgtggaagtggtgcaccagtacggcattgacgcggtattcagcattttgcctcgtctggcacctttagccgaagtgctcgccagcggtgaaaccaatctcttcaacagcgcgcgaaatattgcctgcgccattaaaataggtcagggaattaaaaactaa

SEQ ID NO: 250 - protein, 381 aa, Escherichia coli
MKIVIAPDSFKESLSAEKCCQAIKAGFSTLFPDANYICLPIADGGEGTVDAMVAATGGNIVTLEVCGPMGEKVNAFYGLTGDGKTAVIEMAAASGLMLVAPEKRNPLLASSFGTGELIRHALDNDIRHIILGIGGSATVDGGMGMAQALGVRFLDADGQALAANGGNLARVASIEMDECDPRLANCHIEVACDVDNPLVGARGAAAVFGPQKGATPEMVEELEQGLQNYARVLQQQTEINVCQMAGGGAAGGMGIAAAVFLNADIKPGIEIVLNAVNLAQAVQGAALVITGEGRIDSQTAGGKAPLGVASVAKQFNVPVIGIAGVLGDGVEVVHQYGIDAVFSILPRLAPLAEVLASGETNLFNSARNIACAIKIGQGIKN

SEQ ID NO: 251 - DNA, 1146 bp, Escherichia coli
atgaaaatcgtaatcgccccagactcttataaagaaagtttatctgccagcgaggttgcgcaggcgatagaaaaaggatttcgggaaatttttcctgatgcacagtacgtttctgttccggttgccgacggtggcgaaggaacggtggaagcgatgattgcagccacccagggggctgaacgtcacgcctgggttacagggccgctgggcgagaaagtgaatgccagttgggggatctccggcgatggcaaaaccgcgtttattgaaatggcggcggccagtgggctggagctggtacctgcggaaaaacgcgatccactcgtgaccacttcacgcggcacaggcgagttaatcctgcaggcgctggagagcggtgcgacaaacattattatcggcattggcggcagcgctacaaatgatggcggcgcaggcatggtacaggcgctgggggcgaaattatgcgacgccaacggcaatgaaattggttttggcggcggtagtcttaatactctgaatgatattgatatttccggcctcgatccgcgcttaaaagattgcgtcattcgcgtcgcttgtgatgtcaccaatccgctggtgggcgataacggcgcatcgcgcatctttggcccacaaaagggagccagtgaagcgatgattgttgagctggacaataacctctctcactatgccgaggtcattaaaaaagcgctgcatgttgatgtgaaagatgtccccggtgcaggagctgcgggtggtatgggcgcggcgctaatggcgtttcttggtgcggaactgaaaagtggtattgaaatcgtcactacggcgctgaatctggaggaacatattcacgattgtacgctggtgatcaccggtgaagggcgtattgacagccagagtattcacgggaaggtaccgattggtgtcgcaaacgtggcgaagaagtaccataaaccggtgattggcattgcgggtagcctgaccgatgatgttggcgttgtacatcagcatggcattgatgcggtcttcagcgtattgaccagcataggtacgttggacgaagcattccgcggggcttatgacaatatctgccgtgcttcacgtaatatcgccgcgacactggcgattggaatgcgcaacgcggggtga

SEQ ID NO: 252 - protein, 381 aa, Escherichia coli
MKIVIAPDSYKESLSASEVAQAIEKGFREIFPDAQYVSVPVADGGEGTVEAMIAATQGAERHAWVTGPLGEKVNASWGISGDGKTAFIEMAAASGLELVPAEKRDPLVTTSRGTGELILQALESGATNIIIGIGGSATNDGGAGMVQALGAKLCDANGNEIGFGGGSLNTLNDIDISGLDPRLKDCVIRVACDVTNPLVGDNGASRIFGPQKGASEAMIVELDNNLSHYAEVIKKALHVDVKDVPGAGAAGGMGAALMAFLGAELKSGIEIVTTALNLEEHIHDCTLVITGEGRIDSQSIHGKVPIGVANVAKKYHKPVIGIAGSLTDDVGVVHQHGIDAVFSVLTSIGTLDEAFRGAYDNICRASRNIAATLAIGMRNAG

SEQ ID NO: 253 - DNA, 450 bp, Escherichia coli
atgaaaaagattgcatttggctgtgatcatgtcggtttcattttaaaacatgaaatagtggcacatttagttgagcgtggcgttgaagtgattgataaaggaacctggtcgtcagagcgtactgattatccacattacgccagtcaagtcgcactggctgttgctggcggagaggttgatggcgggattttgatttgtggtactggcgtcggtatttcgatagcggcgaacaagtttgccggaattcgcgcggtcgtctgtagcgaaccttattccgcgcaactttcgcggcagcataacgacaccaacgtgctggcttttggttcacgagtggttggcctcgaactggcaaaaatgattgtggatgcgtggctgggcgcacagtacgaaggcggtcgtcatcaacaacgcgtggaggcgattacggcaatagagcagcggagaaattga

SEQ ID NO: 254 - protein, 149 aa, Escherichia coli
MKKIAFGCDHVGFILKHEIVAHLVERGVEVIDKGTWSSERTDYPHYASQVALAVAGGEVDGGILICGTGVGISIAANKFAGIRAVVCSEPYSAQLSRQHNDTNVLAFGSRVVGLELAKMIVDAWLGAQYEGGRHQQRVEAITAIEQRRN

SEQ ID NO: 255 - DNA, 1869 bp, Saccharomyces cerevisiae PGM3
atgttgcaaggaattttagaaaccgtaccatctgacttgaaagatccgatatcattatggtttaagcaagaccgcaacccaaaaactatagaagaggtcaccgctctctgcaaaaaatccgactggaatgagttacacaaaagatttgattctagaattcagtttggcactgctggtttaagatcgcaaatgcaagctggctttagcaggatgaatactttagtagtcatacaagcgtctcagggattggcaacttatgtaagacaacagtttccagacaatttggtagctgttgtgggacacgatcatagattccattctaaggagttcgctagagctactgctgctgcatttcttttaaaaggatttaaggtacattatttgaatcctgaccacgaatttgttcatacccctttagttccctttgcagtggataagctaaaggcctccgttggcgtaatgataacagcaagtcacaacccaaaaatggataatggatataaagtatactattccaatggatgccaaatcattccacctcacgatcatgccatctctgattccattgacgcaaatttagaaccatgggccaatgtgtgggatttcgacgatgttctaaataaggctctcaaacaagggaaattgatgtattccagagaagaaatgctgaagttatatttagaggaggtttctaaaaatctggtagaaatcaacccattaaagcttgaagtaaaagccaaaccttggttcgtttacactccaatgcatggggttggatttgacattttcagcaccatcgtaaaaaaaacactgtgcctggtagaaggtaaggattacctatgtgttcctgaacaacaaaatccagatccttctttcccaactgttggatttcctaaccctgaagaaaaaggtgctttagacattggtataaacttggctgaaaaacatgacattgacttacttgttgccaacgaccctgacgctgatagattctctgttgctgttaaagatatgcagtcaggcgaatggcgacaactaacaggtaacgaaatcggttttctttttgcattttatgaatatcagaaatataaaagtatggacaaagaatttcagcacgttcatccgttggctatgttaaattcaacagtgtcttcacaaatgataaaaaaaatggcagaaatagaagggttccattatgaggatacattaacaggatttaagtggatcggaaatcgtgccatactcttggaaaagaaaggctattacgttccttttggattcgaggaagcaataggctacatgtttccagcaatggagcatgataaggatggtatcagtgcatccattgtcttcttgcaagcctactgtaagtggaaaatagaccacaatttggacccgctaaatgtcttagaaaatggcttcaaaaaatatggcgtgttcaaagagtacaatggctattatgtcgttccaaatccaactgttacaaaagatatatttgactacatcaggaatgtctacactcctgagggcgcgtcatatccttcatctattggtgaagaaatcgaagtactttactatcgagatttaaccactggttaccaatcggataccataaatcataaacctactctacccgtcgatcctacatcacaaatgataacagtatctgctagaccaagtaacggtagtgagaatgagcatatccgcttcactattcgcgggtccggaacagaaccaaaacttaaagtatatattgaagcttgcgcaaatgaagaacaaagagcctctttcttggcgaaattgacttggaatgtgctgagacgtgaatggtttagaccagatgaaatgaatatagttacaaaattttga

SEQ ID NO: 256 - DNA, 897 bp, Homo sapiens cDNA khkC
atggtggaagagaagcagatcctgtgcgtggggctagtggtgctggacgtcatcagcctggtggacaagtaccctaaggaggactcggagataaggtgtttgtcccagagatggcagcgcggaggcaacgcgtccaactcctgcaccgttctctccctgctcggagccccctgtgccttcatgggctcaatggctcctggccatgttgctgacttcctggtggccgacttcaggcggcggggcgtggacgtgtctcaggtggcctggcagagcaagggggacacccccagctcctgctgcatcatcaacaactccaatggcaaccgtaccattgtgctccatgacacgagcctgccagatgtgtctgctacagactttgagaaggttgatctgacccagttcaagtggatccacattgagggccggaacgcatcggagcaggtgaagatgctgcagcggatagacgcacacaacaccaggcagcctccagagcagaagatccgggtgtccgtggaggtggagaagccacgagaggagctcttccagctgtttggctacggagacgtggtgtttgtcagcaaagatgtggccaagcacttggggttccagtcagcagaggaagccttgaggggcttgtatggtcgtgtgaggaaaggggctgtgcttgtctgtgcctgggctgaggagggcgccgacgccctgggccctgatggcaaattgctccactcggatgctttcccgccaccccgcgtggtggatacactgggagctggagacaccttcaatgcctccgtcatcttcagcctctcccaggggaggagcgtgcaggaagcactgagattcgggtgccaggtggccggcaagaagtgtggcctgcagggctttgatggcatcgtg

SEQ ID NO: 257 - DNA, 1419 bp, Escherichia coli fucK
atgaaacaagaagttatcctggtactcgactgtggcgcgaccaatgtcagggccatcgcggttaatcggcagggcaaaattgttgcccgcgcctcaacgcctaatgccagcgatatcgcgatggaaaacaacacctggcaccagtggtctttagacgccattttgcaacgctttgctgattgctgtcggcaaatcaatagtgaactgactgaatgccacatccgcggtatcgccgtcaccacctttggtgtggatggcgctctggtagataagcaaggcaatctgctctatccgattattagctggaaatgtccgcgaacagcagcggttatggacaatattgaacggttaatctccgcacagcggttgcaggctatttctggcgtcggagcctttagtttcaatacgttatataagttggtgtggttgaaagaaaatcatccacaactgctggaacgcgcgcacgcctggctctttatttcgtcgctgattaaccaccgtttaaccggcgaattcactactgatatcacgatggccggaaccagccagatgctggatatccagcaacgcgatttcagtccgcaaattttacaagccaccggtattccacgccgactcttccctcgtctggtggaagcgggtgaacagattggtacgctacagaacagcgccgcagcaatgctcggcttacccgttggcataccggtgatttccgcaggtcacgatacccagttcgccctttttggcgctggtgctgaacaaaatgaacccgtgctctcttccggtacatgggaaattttaatggttcgcagcgcccaggttgatacttcgctgttaagtcagtacgccggttccacctgcgaactggatagccaggcagggttgtataacccaggtatgcaatggctggcatccggcgtgctggaatgggtgagaaaactgttctggacggctgaaacaccctggcaaatgttgattgaagaagctcgtctgatcgcgcctggcgcggatggcgtaaaaatgcagtgtgatttattgtcgtgtcagaacgctggctggcaaggagtgacgcttaataccacgcgggggcatttctatcgcgcggcgctggaagggttaactgcgcaattacagcgcaatctacagatgctggaaaaaatcgggcactttaaggcctctgaattattgttagtcggtggaggaagtcgcaacacattgtggaatcagattaaagccaatatgcttgatattccggtaaaagttctcgacgacgccgaaacgaccgtcgcaggagctgcgctgttcggttggtatggcgtaggggaatttaacagcccggaagaagcccgcgcacagattcattatcagtaccgttatttctacccgcaaactgaacctgaatttatagaggaagtgtga

SEQ ID NO: 258 - protein, 622 aa, Saccharomyces cerevisiae PGM3
MLQGILETVPSDLKDPISLWFKQDRNPKTIEEVTALCKKSDWNELHKRFDSRIQFGTAGLRSQMQAGFSRMNTLVVIQASQGLATYVRQQFPDNLVAVVGHDHRFHSKEFARATAAAFLLKGFKVHYLNPDHEFVHTPLVPFAVDKLKASVGVMITASHNPKMDNGYKVYYSNGCQIIPPHDHAISDSIDANLEPWANVWDFDDVLNKALKQGKLMYSREEMLKLYLEEVSKNLVEINPLKLEVKAKPWFVYTPMHGVGFDIFSTIVKKTLCLVEGKDYLCVPEQQNPDPSFPTVGFPNPEEKGALDIGINLAEKHDIDLLVANDPDADRFSVAVKDMQSGEWRQLTGNEIGFLFAFYEYQKYKSMDKEFQHVHPLAMLNSTVSSQMIKKMAEIEGFHYEDTLTGFKWIGNRAILLEKKGYYVPFGFEEAIGYMFPAMEHDKDGISASIVFLQAYCKWKIDHNLDPLNVLENGFKKYGVFKEYNGYYVVPNPTVTKDIFDYIRNVYTPEGASYPSSIGEEIEVLYYRDLTTGYQSDTINHKPTLPVDPTSQMITVSARPSNGSENEHIRFTIRGSGTEPKLKVYIEACANEEQRASFLAKLTWNVLRREWFRPDEMNIVTKF
